United States Patent Application Publication US 2015/0153356 A1 - sequence listing, part 2

SEQ ID NO: 29109 - protein, 10 aa, Artificial Sequence
  Description of Artificial Sequence: Synthetic epitope
MTELQQDVED

SEQ ID NO: 29110 - protein, 10 aa, Artificial Sequence
  Description of Artificial Sequence: Synthetic epitope
MTELSTVKDK

SEQ ID NO: 29111 - protein, 10 aa, Artificial Sequence
  Description of Artificial Sequence: Synthetic epitope
MTEQDTKYLE

SEQ ID NO: 29112 - protein, 10 aa, Artificial Sequence
  Description of Artificial Sequence: Synthetic epitope
MTEQMTLRGT

SEQ ID NO: 29113 - protein, 10 aa, Artificial Sequence
  Description of Artificial Sequence: Synthetic epitope
MTESSAKDMA

SEQ ID NO: 29114 - protein, 10 aa, Artificial Sequence
  Description of Artificial Sequence: Synthetic epitope
MTFQASHRSA

SEQ ID NO: 29115 - protein, 10 aa, Artificial Sequence
  Description of Artificial Sequence: Synthetic epitope
MTGDELSTSE

SEQ ID NO: 29116 - protein, 10 aa, Artificial Sequence
  Description of Artificial Sequence: Synthetic epitope
MTGREHAHKG

SEQ ID NO: 29117 - protein, 10 aa, Artificial Sequence
  Description of Artificial Sequence: Synthetic epitope
MTGRSERSQP

SEQ ID NO: 29118 - protein, 10 aa, Artificial Sequence
  Description of Artificial Sequence: Synthetic epitope
MTHQDLSITA

SEQ ID NO: 29119 - protein, 10 aa, Artificial Sequence
  Description of Artificial Sequence: Synthetic epitope
MTIAKNAGVE

SEQ ID NO: 29120 - protein, 10 aa, Artificial Sequence
  Description of Artificial Sequence: Synthetic epitope
MTIIAAKEGT

SEQ ID NO: 29121 - protein, 10 aa, Artificial Sequence
  Description of Artificial Sequence: Synthetic epitope
MTILLNSSLQ

SEQ ID NO: 29122 - protein, 10 aa, Artificial Sequence
  Description of Artificial Sequence: Synthetic epitope
MTISVEKKVP

SEQ ID NO: 29123 - protein, 10 aa, Artificial Sequence
  Description of Artificial Sequence: Synthetic epitope
MTITKLTQKP

SEQ ID NO: 29124 - protein, 10 aa, Artificial Sequence
  Description of Artificial Sequence: Synthetic epitope
MTKADNDNRD

SEQ ID NO: 29125 - protein, 10 aa, Artificial Sequence
  Description of Artificial Sequence: Synthetic epitope
MTKILDSFAA

SEQ ID NO: 29126 - protein, 10 aa, Artificial Sequence
  Description of Artificial Sequence: Synthetic epitope
MTKLSAQVKG

SEQ ID NO: 29127 - protein, 10 aa, Artificial Sequence
  Description of Artificial Sequence: Synthetic epitope
MTKNEKKSLN

SEQ ID NO: 29128 - protein, 10 aa, Artificial Sequence
  Description of Artificial Sequence: Synthetic epitope
MTKQIISKER

SEQ ID NO: 29129 - protein, 10 aa, Artificial Sequence
  Description of Artificial Sequence: Synthetic epitope
MTKSLTEEKT

SEQ ID NO: 29130 - protein, 10 aa, Artificial Sequence
  Description of Artificial Sequence: Synthetic epitope
MTKVPATKKL

SEQ ID NO: 29131 - protein, 10 aa, Artificial Sequence
  Description of Artificial Sequence: Synthetic epitope
MTLAASSQRS

SEQ ID NO: 29132 - protein, 10 aa, Artificial Sequence
  Description of Artificial Sequence: Synthetic epitope
MTLGSLGNSS

SEQ ID NO: 29133 - protein, 10 aa, Artificial Sequence
  Description of Artificial Sequence: Synthetic epitope
MTLHATRGAA

SEQ ID NO: 29134 - protein, 10 aa, Artificial Sequence
  Description of Artificial Sequence: Synthetic epitope
MTLKLKQKTV

SEQ ID NO: 29135 - protein, 10 aa, Artificial Sequence
  Description of Artificial Sequence: Synthetic epitope
MTLKRDETLQ

SEQ ID NO: 29136 - protein, 10 aa, Artificial Sequence
  Description of Artificial Sequence: Synthetic epitope
MTLLATIMSG

SEQ ID NO: 29137 - protein, 10 aa, Artificial Sequence
  Description of Artificial Sequence: Synthetic epitope
MTLSKSISLP

SEQ ID NO: 29138 - protein, 10 aa, Artificial Sequence
  Description of Artificial Sequence: Synthetic epitope
MTMDGDSSTT

SEQ ID NO: 29139 - protein, 10 aa, Artificial Sequence
  Description of Artificial Sequence: Synthetic epitope
MTMENYSMAA

SEQ ID NO: 29140 - protein, 10 aa, Artificial Sequence
  Description of Artificial Sequence: Synthetic epitope
MTMFENVTRA

SEQ ID NO: 29141 - protein, 10 aa, Artificial Sequence
  Description of Artificial Sequence: Synthetic epitope
MTMQTSTLDV

SEQ ID NO: 29142 - protein, 10 aa, Artificial Sequence
  Description of Artificial Sequence: Synthetic epitope
MTMRSAVFKA

SEQ ID NO: 29143 - protein, 10 aa, Artificial Sequence
  Description of Artificial Sequence: Synthetic epitope
MTMTMSYKAI

SEQ ID NO: 29144 - protein, 10 aa, Artificial Sequence
  Description of Artificial Sequence: Synthetic epitope
MTNLNASQAN

SEQ ID NO: 29145 - protein, 10 aa, Artificial Sequence
  Description of Artificial Sequence: Synthetic epitope
MTNPSDRVLP

SEQ ID NO: 29146 - protein, 10 aa, Artificial Sequence
  Description of Artificial Sequence: Synthetic epitope
MTNQYGILFK

SEQ ID NO: 29147 - protein, 10 aa, Artificial Sequence
  Description of Artificial Sequence: Synthetic epitope
MTNRTENTRP

SEQ ID NO: 29148 - protein, 10 aa, Artificial Sequence
  Description of Artificial Sequence: Synthetic epitope
MTPKASGTMF

SEQ ID NO: 29149 - protein, 10 aa, Artificial Sequence
  Description of Artificial Sequence: Synthetic epitope
MTPKSKRKSI

SEQ ID NO: 29150 - protein, 10 aa, Artificial Sequence
  Description of Artificial Sequence: Synthetic epitope
MTPSELMDEI

SEQ ID NO: 29151 - protein, 10 aa, Artificial Sequence
  Description of Artificial Sequence: Synthetic epitope
MTQGKLSVAN

SEQ ID NO: 29152 - protein, 10 aa, Artificial Sequence
  Description of Artificial Sequence: Synthetic epitope
MTQMSQVQEL

SEQ ID NO: 29153 - protein, 10 aa, Artificial Sequence
  Description of Artificial Sequence: Synthetic epitope
MTQQKDSFEM

SEQ ID NO: 29154 - protein, 10 aa, Artificial Sequence
  Description of Artificial Sequence: Synthetic epitope
MTQRSIAGPI

SEQ ID NO: 29155 - protein, 10 aa, Artificial Sequence
  Description of Artificial Sequence: Synthetic epitope
MTQTLKYASR

SEQ ID NO: 29156 - protein, 10 aa, Artificial Sequence
  Description of Artificial Sequence: Synthetic epitope
MTRLQTNKEA

SEQ ID NO: 29157 - protein, 10 aa, Artificial Sequence
  Description of Artificial Sequence: Synthetic epitope
MTRNQASSEA

SEQ ID NO: 29158 - protein, 10 aa, Artificial Sequence
  Description of Artificial Sequence: Synthetic epitope
MTRQSKKQEE

SEQ ID NO: 29159 - protein, 10 aa, Artificial Sequence
  Description of Artificial Sequence: Synthetic epitope
MTRTLLTEKK

SEQ ID NO: 29160 - protein, 10 aa, Artificial Sequence
  Description of Artificial Sequence: Synthetic epitope
MTSANKAIEL

SEQ ID NO: 29161 - protein, 10 aa, Artificial Sequence
  Description of Artificial Sequence: Synthetic epitope
MTSDEVSETS

SEQ ID NO: 29162 - protein, 10 aa, Artificial Sequence
  Description of Artificial Sequence: Synthetic epitope
MTSEIASQEE

SEQ ID NO: 29163 - protein, 10 aa, Artificial Sequence
  Description of Artificial Sequence: Synthetic epitope
MTSIKEQAAI

SEQ ID NO: 29164 - protein, 10 aa, Artificial Sequence
  Description of Artificial Sequence: Synthetic epitope
MTSITSASEA

SEQ ID NO: 29165 - protein, 10 aa, Artificial Sequence
  Description of Artificial Sequence: Synthetic epitope
MTSKVTRLSS

SEQ ID NO: 29166 - protein, 10 aa, Artificial Sequence
  Description of Artificial Sequence: Synthetic epitope
MTSLTQRSSG

SEQ ID NO: 29167 - protein, 10 aa, Artificial Sequence
  Description of Artificial Sequence: Synthetic epitope
MTSNSSAETD

SEQ ID NO: 29168 - protein, 10 aa, Artificial Sequence
  Description of Artificial Sequence: Synthetic epitope
MTSPRNKSKT

SEQ ID NO: 29169 - protein, 10 aa, Artificial Sequence
  Description of Artificial Sequence: Synthetic epitope
MTSQSQGIHQ

SEQ ID NO: 29170 - protein, 10 aa, Artificial Sequence
  Description of Artificial Sequence: Synthetic epitope
MTSQSSVISN

SEQ ID NO: 29171 - protein, 10 aa, Artificial Sequence
  Description of Artificial Sequence: Synthetic epitope
MTSRDIEVQG

SEQ ID NO: 29172 - protein, 10 aa, Artificial Sequence
  Description of Artificial Sequence: Synthetic epitope
MTSSEMANSL

SEQ ID NO: 29173 - protein, 10 aa, Artificial Sequence
  Description of Artificial Sequence: Synthetic epitope
MTSSPVSRVV

SEQ ID NO: 29174 - protein, 10 aa, Artificial Sequence
  Description of Artificial Sequence: Synthetic epitope
MTSTRTRMQK

SEQ ID NO: 29175 - protein, 10 aa, Artificial Sequence
  Description of Artificial Sequence: Synthetic epitope
MTSTTSQKPG

SEQ ID NO: 29176 - protein, 10 aa, Artificial Sequence
  Description of Artificial Sequence: Synthetic epitope
MTSVASLPEQ

SEQ ID NO: 29177 - protein, 10 aa, Artificial Sequence
  Description of Artificial Sequence: Synthetic epitope
MTTAILERLS

SEQ ID NO: 29178 - protein, 10 aa, Artificial Sequence
  Description of Artificial Sequence: Synthetic epitope
MTTASTSQVR

SEQ ID NO: 29179 - protein, 10 aa, Artificial Sequence
  Description of Artificial Sequence: Synthetic epitope
MTTAVERKYI

SEQ ID NO: 29180 - protein, 10 aa, Artificial Sequence
  Description of Artificial Sequence: Synthetic epitope
MTTENLKEKS

SEQ ID NO: 29181 - protein, 10 aa, Artificial Sequence
  Description of Artificial Sequence: Synthetic epitope
MTTHRNDTLS

SEQ ID NO: 29182 - protein, 10 aa, Artificial Sequence
  Description of Artificial Sequence: Synthetic epitope
MTTLIQRNAT

SEQ ID NO: 29183 - protein, 10 aa, Artificial Sequence
  Description of Artificial Sequence: Synthetic epitope
MTTLTQNASS

SEQ ID NO: 29184 - protein, 10 aa, Artificial Sequence
  Description of Artificial Sequence: Synthetic epitope
MTTNIRSARG

SEQ ID NO: 29185 - protein, 10 aa, Artificial Sequence
  Description of Artificial Sequence: Synthetic epitope
MTTSHMNGHV

SEQ ID NO: 29186 - protein, 10 aa, Artificial Sequence
  Description of Artificial Sequence: Synthetic epitope
MTTSIRQFTS

SEQ ID NO: 29187 - protein, 10 aa, Artificial Sequence
  Description of Artificial Sequence: Synthetic epitope
MTVEVEGSTV

SEQ ID NO: 29188 - protein, 10 aa, Artificial Sequence
  Description of Artificial Sequence: Synthetic epitope
MTVHKNQLAQ

SEQ ID NO: 29189 - protein, 10 aa, Artificial Sequence
  Description of Artificial Sequence: Synthetic epitope
MTVKPAKAAS

SEQ ID NO: 29190 - protein, 10 aa, Artificial Sequence
  Description of Artificial Sequence: Synthetic epitope
MTVKTEAAKG

SEQ ID NO: 29191 - protein, 10 aa, Artificial Sequence
  Description of Artificial Sequence: Synthetic epitope
MTVLEAVLEI

SEQ ID NO: 29192 - protein, 10 aa, Artificial Sequence
  Description of Artificial Sequence: Synthetic epitope
MTVQKASRKN

SEQ ID NO: 29193 - protein, 10 aa, Artificial Sequence
  Description of Artificial Sequence: Synthetic epitope
MTVRKKRAIY

SEQ ID NO: 29194 - protein, 10 aa, Artificial Sequence
  Description of Artificial Sequence: Synthetic epitope
MTVSMKPEGQ

SEQ ID NO: 29195 - protein, 10 aa, Artificial Sequence
  Description of Artificial Sequence: Synthetic epitope
MTVVHSIELQ

SEQ ID NO: 29196 - protein, 10 aa, Artificial Sequence
  Description of Artificial Sequence: Synthetic epitope
MTYTEQASKR

SEQ ID NO: 29197 - protein, 10 aa, Artificial Sequence
  Description of Artificial Sequence: Synthetic epitope
MVAAKKTKKS

SEQ ID NO: 29198 - protein, 10 aa, Artificial Sequence
  Description of Artificial Sequence: Synthetic epitope
MVAAQQDTLD

SEQ ID NO: 29199 - protein, 10 aa, Artificial Sequence
  Description of Artificial Sequence: Synthetic epitope
MVADNPSYNT

SEQ ID NO: 29200 - protein, 10 aa, Artificial Sequence
  Description of Artificial Sequence: Synthetic epitope
MVALRKLLAK

SEQ ID NO: 29201 - protein, 10 aa, Artificial Sequence
  Description of Artificial Sequence: Synthetic epitope
MVAMAEAEAG

SEQ ID NO: 29202 - protein, 10 aa, Artificial Sequence
  Description of Artificial Sequence: Synthetic epitope
MVAPRARKEP

SEQ ID NO: 29203 - protein, 10 aa, Artificial Sequence
  Description of Artificial Sequence: Synthetic epitope
MVARFFLQLG

SEQ ID NO: 29204 - protein, 10 aa, Artificial Sequence
  Description of Artificial Sequence: Synthetic epitope
MVASANIKTP

SEQ ID NO: 29205 - protein, 10 aa, Artificial Sequence
  Description of Artificial Sequence: Synthetic epitope
MVASKRKELS

SEQ ID NO: 29206 - protein, 10 aa, Artificial Sequence
  Description of Artificial Sequence: Synthetic epitope
MVAVNLATGK

SEQ ID NO: 29207 - protein, 10 aa, Artificial Sequence
  Description of Artificial Sequence: Synthetic epitope
MVDASKSIEA

SEQ ID NO: 29208 - protein, 10 aa, Artificial Sequence
  Description of Artificial Sequence: Synthetic epitope
MVDELEAVPN

SEQ ID NO: 29209 - protein, 10 aa, Artificial Sequence
  Description of Artificial Sequence: Synthetic epitope
MVDLSVSPDS

SEQ ID NO: 29210 - protein, 10 aa, Artificial Sequence
  Description of Artificial Sequence: Synthetic epitope
MVDYSVWDHI

SEQ ID NO: 29211 - protein, 10 aa, Artificial Sequence
  Description of Artificial Sequence: Synthetic epitope
MVEDLAASYI

SEQ ID NO: 29212 - protein, 10 aa, Artificial Sequence
  Description of Artificial Sequence: Synthetic epitope
MVEKALLYRT

SEQ ID NO: 29213 - protein, 10 aa, Artificial Sequence
  Description of Artificial Sequence: Synthetic epitope
MVEQQISKLK

SEQ ID NO: 29214 - protein, 10 aa, Artificial Sequence
  Description of Artificial Sequence: Synthetic epitope
MVERVVSGGL

SEQ ID NO: 29215 - protein, 10 aa, Artificial Sequence
  Description of Artificial Sequence: Synthetic epitope
MVFPSGQISQ

SEQ ID NO: 29216 - protein, 10 aa, Artificial Sequence
  Description of Artificial Sequence: Synthetic epitope
MVGEEKMSLR

SEQ ID NO: 29217 - protein, 10 aa, Artificial Sequence
  Description of Artificial Sequence: Synthetic epitope
MVGELRYREF

SEQ ID NO: 29218 - protein, 10 aa, Artificial Sequence
  Description of Artificial Sequence: Synthetic epitope
MVGFKATDVP

SEQ ID NO: 29219 - protein, 10 aa, Artificial Sequence
  Description of Artificial Sequence: Synthetic epitope
MVGMTQRSLV

SEQ ID NO: 29220 - protein, 10 aa, Artificial Sequence
  Description of Artificial Sequence: Synthetic epitope
MVHQVLYRAL

SEQ ID NO: 29221 - protein, 10 aa, Artificial Sequence
  Description of Artificial Sequence: Synthetic epitope
MVIMSEFSAD

SEQ ID NO: 29222 - protein, 10 aa, Artificial Sequence
  Description of Artificial Sequence: Synthetic epitope
MVIQTETDRH

SEQ ID NO: 29223 - protein, 10 aa, Artificial Sequence
  Description of Artificial Sequence: Synthetic epitope
MVKALSEEMA

SEQ ID NO: 29224 - protein, 10 aa, Artificial Sequence
  Description of Artificial Sequence: Synthetic epitope
MVKLLVWQKS

SEQ ID NO: 29225 - protein, 10 aa, Artificial Sequence
  Description of Artificial Sequence: Synthetic epitope
MVKLSKEAKQ

SEQ ID NO: 29226 - protein, 10 aa, Artificial Sequence
  Description of Artificial Sequence: Synthetic epitope
MVKQIESKTA

SEQ ID NO: 29227 - protein, 10 aa, Artificial Sequence
  Description of Artificial Sequence: Synthetic epitope
MVKRHKVGQD

SEQ ID NO: 29228 - protein, 10 aa, Artificial Sequence
  Description of Artificial Sequence: Synthetic epitope
MVKTDAVINM

SEQ ID NO: 29229 - protein, 10 aa, Artificial Sequence
  Description of Artificial Sequence: Synthetic epitope
MVLESLTAES

SEQ ID NO: 29230 - protein, 10 aa, Artificial Sequence
  Description of Artificial Sequence: Synthetic epitope
MVLSELAARL

SEQ ID NO: 29231 - protein, 10 aa, Artificial Sequence
  Description of Artificial Sequence: Synthetic epitope
MVLVFLLQQG

SEQ ID NO: 29232 - protein, 10 aa, Artificial Sequence
  Description of Artificial Sequence: Synthetic epitope
MVMFKKIKSF

SEQ ID NO: 29233 - protein, 10 aa, Artificial Sequence
  Description of Artificial Sequence: Synthetic epitope
MVMYARKQQR

SEQ ID NO: 29234 - protein, 10 aa, Artificial Sequence
  Description of Artificial Sequence: Synthetic epitope
MVNQGLTKHM

SEQ ID NO: 29235 - protein, 10 aa, Artificial Sequence
  Description of Artificial Sequence: Synthetic epitope
MVNRRIAMDL

SEQ ID NO: 29236 - protein, 10 aa, Artificial Sequence
  Description of Artificial Sequence: Synthetic epitope
MVNTRKSSLR

SEQ ID NO: 29237 - protein, 10 aa, Artificial Sequence
  Description of Artificial Sequence: Synthetic epitope
MVPWVRTMGQ

SEQ ID NO: 29238 - protein, 10 aa, Artificial Sequence
  Description of Artificial Sequence: Synthetic epitope
MVQKESQATL

SEQ ID NO: 29239 - protein, 10 aa, Artificial Sequence
  Description of Artificial Sequence: Synthetic epitope
MVQQAESLEA

SEQ ID NO: 29240 - protein, 10 aa, Artificial Sequence
  Description of Artificial Sequence: Synthetic epitope
MVQQTNNAEN

SEQ ID NO: 29241 - protein, 10 aa, Artificial Sequence
  Description of Artificial Sequence: Synthetic epitope
MVRISKPKTF

SEQ ID NO: 29242 - protein, 10 aa, Artificial Sequence
  Description of Artificial Sequence: Synthetic epitope
MVRPVRHKKP

SEQ ID NO: 29243 - protein, 10 aa, Artificial Sequence
  Description of Artificial Sequence: Synthetic epitope
MVSGLRLASR

SEQ ID NO: 29244 - protein, 10 aa, Artificial Sequence
  Description of Artificial Sequence: Synthetic epitope
MVSKLTSLQQ

SEQ ID NO: 29245 - protein, 10 aa, Artificial Sequence
  Description of Artificial Sequence: Synthetic epitope
MVSLSEEMEN

SEQ ID NO: 29246 - protein, 10 aa, Artificial Sequence
  Description of Artificial Sequence: Synthetic epitope
MVSQSTVRQD

SEQ ID NO: 29247 - protein, 10 aa, Artificial Sequence
  Description of Artificial Sequence: Synthetic epitope
MVSRRNVKDS

SEQ ID NO: 29248 - protein, 10 aa, Artificial Sequence
  Description of Artificial Sequence: Synthetic epitope
MVSSFAGIRE

SEQ ID NO: 29249 - protein, 10 aa, Artificial Sequence
  Description of Artificial Sequence: Synthetic epitope
MVSSKSLVPT

SEQ ID NO: 29250 - protein, 10 aa, Artificial Sequence
  Description of Artificial Sequence: Synthetic epitope
MVSSQPKYDL

SEQ ID NO: 29251 - protein, 10 aa, Artificial Sequence
  Description of Artificial Sequence: Synthetic epitope
MVSSQTKTVR

SEQ ID NO: 29252 - protein, 10 aa, Artificial Sequence
  Description of Artificial Sequence: Synthetic epitope
MVSVDRGSAL

SEQ ID NO: 29253 - protein, 10 aa, Artificial Sequence
  Description of Artificial Sequence: Synthetic epitope
MVTAMNVSHE

SEQ ID NO: 29254 - protein, 10 aa, Artificial Sequence
  Description of Artificial Sequence: Synthetic epitope
MVTEKITLRS

SEQ ID NO: 29255 - protein, 10 aa, Artificial Sequence
  Description of Artificial Sequence: Synthetic epitope
MVTLATEALA

SEQ ID NO: 29256 - protein, 10 aa, Artificial Sequence
  Description of Artificial Sequence: Synthetic epitope
MVTRTQLLEE

SEQ ID NO: 29257 - protein, 10 aa, Artificial Sequence
  Description of Artificial Sequence: Synthetic epitope
MVTSENLTEG

SEQ ID NO: 29258 - protein, 10 aa, Artificial Sequence
  Description of Artificial Sequence: Synthetic epitope
MVTWHVLKPH

SEQ ID NO: 29259 - protein, 10 aa, Artificial Sequence
  Description of Artificial Sequence: Synthetic epitope
MVVMARLSRP

SEQ ID NO: 29260 - protein, 10 aa, Artificial Sequence
  Description of Artificial Sequence: Synthetic epitope
MVVSMTLGLH

SEQ ID NO: 29261 - protein, 10 aa, Artificial Sequence
  Description of Artificial Sequence: Synthetic epitope
MVWIISRHYN

SEQ ID NO: 29262 - protein, 10 aa, Artificial Sequence
  Description of Artificial Sequence: Synthetic epitope
MVWYKQIEQV

SEQ ID NO: 29263 - protein, 10 aa, Artificial Sequence
  Description of Artificial Sequence: Synthetic epitope
MVYATITSQL

SEQ ID NO: 29264 - protein, 10 aa, Artificial Sequence
  Description of Artificial Sequence: Synthetic epitope
MVYPRRNLSA

SEQ ID NO: 29265 - protein, 10 aa, Artificial Sequence
  Description of Artificial Sequence: Synthetic epitope
MVYQSARQEP

SEQ ID NO: 29266 - protein, 10 aa, Artificial Sequence
  Description of Artificial Sequence: Synthetic epitope
MWHEARKHER

SEQ ID NO: 29267 - protein, 10 aa, Artificial Sequence
  Description of Artificial Sequence: Synthetic epitope
MWINQELKQK

SEQ ID NO: 29268 - protein, 10 aa, Artificial Sequence
  Description of Artificial Sequence: Synthetic epitope
MWNSSDANFS

SEQ ID NO: 29269 - protein, 10 aa, Artificial Sequence
  Description of Artificial Sequence: Synthetic epitope
MWPGILVGGA

SEQ ID NO: 29270 - protein, 10 aa, Artificial Sequence
  Description of Artificial Sequence: Synthetic epitope
MWQKKANTPE

SEQ ID NO: 29271 - protein, 10 aa, Artificial Sequence
  Description of Artificial Sequence: Synthetic epitope
MWRMINRSNG

SEQ ID NO: 29272 - protein, 10 aa, Artificial Sequence
  Description of Artificial Sequence: Synthetic epitope
MWYVSTRGVA

SEQ ID NO: 29273 - protein, 10 aa, Artificial Sequence
  Description of Artificial Sequence: Synthetic epitope
MYAAVEHGPV

SEQ ID NO: 29274 - protein, 10 aa, Artificial Sequence
  Description of Artificial Sequence: Synthetic epitope
MYDSKMEESK

SEQ ID NO: 29275 - protein, 10 aa, Artificial Sequence
  Description of Artificial Sequence: Synthetic epitope
MYEGKKTKNM

SEQ ID NO: 29276 - protein, 10 aa, Artificial Sequence
  Description of Artificial Sequence: Synthetic epitope
MYGKKVLSQE

SEQ ID NO: 29277 - protein, 10 aa, Artificial Sequence
  Description of Artificial Sequence: Synthetic epitope
MYGQEKSKEQ

SEQ ID NO: 29278 - protein, 10 aa, Artificial Sequence
  Description of Artificial Sequence: Synthetic epitope
MYLGKIMTAP

SEQ ID NO: 29279 - protein, 10 aa, Artificial Sequence
  Description of Artificial Sequence: Synthetic epitope
MYLRRAVSKT

SEQ ID NO: 29280 - protein, 10 aa, Artificial Sequence
  Description of Artificial Sequence: Synthetic epitope
MYNQATQEIA

SEQ ID NO: 29281 - protein, 10 aa, Artificial Sequence
  Description of Artificial Sequence: Synthetic epitope
MYNTVWSMDR

SEQ ID NO: 29282 - protein, 10 aa, Artificial Sequence
  Description of Artificial Sequence: Synthetic epitope
MYQPQKMDLT

SEQ ID NO: 29283 - protein, 10 aa, Artificial Sequence
  Description of Artificial Sequence: Synthetic epitope
MYRSSARSSV

SEQ ID NO: 29284 - protein, 10 aa, Artificial Sequence
  Description of Artificial Sequence: Synthetic epitope
MYSMMNVGQT

SEQ ID NO: 29285 - protein, 10 aa, Artificial Sequence
  Description of Artificial Sequence: Synthetic epitope
MYTVTRMESM

SEQ ID NO: 29286 - protein, 10 aa, Artificial Sequence
  Description of Artificial Sequence: Synthetic epitope
MYVITTPAGL

SEQ ID NO: 29287 - protein, 10 aa, Artificial Sequence
  Description of Artificial Sequence: Synthetic epitope
MYWPSSVPVQ

SEQ ID NO: 29288 - protein, 10 aa, Artificial Sequence
  Description of Artificial Sequence: Synthetic epitope
MYWSNQITRR

SEQ ID NO: 29289 - protein, 10 aa, Artificial Sequence
  Description of Artificial Sequence: Synthetic epitope
NAADKNSVKT

SEQ ID NO: 29290 - protein, 10 aa, Artificial Sequence
  Description of Artificial Sequence: Synthetic epitope
NAAGVAKQFL

SEQ ID NO: 29291 - protein, 10 aa, Artificial Sequence
  Description of Artificial Sequence: Synthetic epitope
NAAIEALKAT

SEQ ID NO: 29292 - protein, 10 aa, Artificial Sequence
  Description of Artificial Sequence: Synthetic epitope
NAAKAEEKDE

SEQ ID NO: 29293 - protein, 10 aa, Artificial Sequence
  Description of Artificial Sequence: Synthetic epitope
NAAKEKALQQ

SEQ ID NO: 29294 - protein, 10 aa, Artificial Sequence
  Description of Artificial Sequence: Synthetic epitope
NAAKGSSNSY

SEQ ID NO: 29295 - protein, 10 aa, Artificial Sequence
  Description of Artificial Sequence: Synthetic epitope
NAAKKFVSGQ

SEQ ID NO: 29296 - protein, 10 aa, Artificial Sequence
  Description of Artificial Sequence: Synthetic epitope
NAALMKLAQL

SEQ ID NO: 29297 - protein, 10 aa, Artificial Sequence
  Description of Artificial Sequence: Synthetic epitope
NAALQETEAP

SEQ ID NO: 29298 - protein, 10 aa, Artificial Sequence
  Description of Artificial Sequence: Synthetic epitope
NAALTLAARP

SEQ ID NO: 29299 - protein, 10 aa, Artificial Sequence
  Description of Artificial Sequence: Synthetic epitope
NAANASASKS

SEQ ID NO: 29300 - protein, 10 aa, Artificial Sequence
  Description of Artificial Sequence: Synthetic epitope
NAAQLKKISD

SEQ ID NO: 29301 - protein, 10 aa, Artificial Sequence
  Description of Artificial Sequence: Synthetic epitope
NAARLRKKLL

SEQ ID NO: 29302 - protein, 10 aa, Artificial Sequence
  Description of Artificial Sequence: Synthetic epitope
NAASFKEVSD

SEQ ID NO: 29303 - protein, 10 aa, Artificial Sequence
  Description of Artificial Sequence: Synthetic epitope
NAASQASTNL

SEQ ID NO: 29304 - protein, 10 aa, Artificial Sequence
  Description of Artificial Sequence: Synthetic epitope
NAASTLTERP

SEQ ID NO: 29305 - protein, 10 aa, Artificial Sequence
  Description of Artificial Sequence: Synthetic epitope
NAATSQMAGG

SEQ ID NO: 29306 - protein, 10 aa, Artificial Sequence
  Description of Artificial Sequence: Synthetic epitope
NADELEALQM

SEQ ID NO: 29307 - protein, 10 aa, Artificial Sequence
  Description of Artificial Sequence: Synthetic epitope
NADELEALQM

SEQ ID NO: 29308 - protein, 10 aa, Artificial Sequence
  Description of Artificial Sequence: Synthetic epitope
NADIIAVMAQ

SEQ ID NO: 29309 - protein, 10 aa, Artificial Sequence
  Description of Artificial Sequence: Synthetic epitope
NADRKVKGNL

SEQ ID NO: 29310 - protein, 10 aa, Artificial Sequence
  Description of Artificial Sequence: Synthetic epitope
NADSSAVSSQ

SEQ ID NO: 29311 - protein, 10 aa, Artificial Sequence
  Description of Artificial Sequence: Synthetic epitope
NADTAKQLTV

SEQ ID NO: 29312 - protein, 10 aa, Artificial Sequence
  Description of Artificial Sequence: Synthetic epitope
NADVLKTAEK

SEQ ID NO: 29313 - protein, 10 aa, Artificial Sequence
  Description of Artificial Sequence: Synthetic epitope
NAEALAELSE

SEQ ID NO: 29314 - protein, 10 aa, Artificial Sequence
  Description of Artificial Sequence: Synthetic epitope
NAEALKEMLG

SEQ ID NO: 29315 - protein, 10 aa, Artificial Sequence
  Description of Artificial Sequence: Synthetic epitope
NAEALSVEAN

SEQ ID NO: 29316 - protein, 10 aa, Artificial Sequence
  Description of Artificial Sequence: Synthetic epitope
NAEASRTKQQ

SEQ ID NO: 29317 - protein, 10 aa, Artificial Sequence
  Description of Artificial Sequence: Synthetic epitope
NAEEQTSGQA

SEQ ID NO: 29318 - protein, 10 aa, Artificial Sequence
  Description of Artificial Sequence: Synthetic epitope
NAEIVVNSAK

SEQ ID NO: 29319 - protein, 10 aa, Artificial Sequence
  Description of Artificial Sequence: Synthetic epitope
NAEKLLNVVK

SEQ ID NO: 29320 - protein, 10 aa, Artificial Sequence
  Description of Artificial Sequence: Synthetic epitope
NAELASYESQ

SEQ ID NO: 29321 - protein, 10 aa, Artificial Sequence
  Description of Artificial Sequence: Synthetic epitope
NAELQRYILA

SEQ ID NO: 29322 - protein, 10 aa, Artificial Sequence
  Description of Artificial Sequence: Synthetic epitope
NAELSASEQD

SEQ ID NO: 29323 - protein, 10 aa, Artificial Sequence
  Description of Artificial Sequence: Synthetic epitope
NAEMSKELLG

SEQ ID NO: 29324 - protein, 10 aa, Artificial Sequence
  Description of Artificial Sequence: Synthetic epitope
NAEQNQHLRA

SEQ ID NO: 29325 - protein, 10 aa, Artificial Sequence
  Description of Artificial Sequence: Synthetic epitope
NAEQQLKIQE

SEQ ID NO: 29326 - protein, 10 aa, Artificial Sequence
  Description of Artificial Sequence: Synthetic epitope
NAERKIIEKK

SEQ ID NO: 29327 - protein, 10 aa, Artificial Sequence
  Description of Artificial Sequence: Synthetic epitope
NAERLRRKRA

SEQ ID NO: 29328 - protein, 10 aa, Artificial Sequence
  Description of Artificial Sequence: Synthetic epitope
NAESDSTSWS

SEQ ID NO: 29329 - protein, 10 aa, Artificial Sequence
  Description of Artificial Sequence: Synthetic epitope
NAESNVSIIE

SEQ ID NO: 29330 - protein, 10 aa, Artificial Sequence
  Description of Artificial Sequence: Synthetic epitope
NAESRVNRRQ

SEQ ID NO: 29331 - protein, 10 aa, Artificial Sequence
  Description of Artificial Sequence: Synthetic epitope
NAETMLSSLD

SEQ ID NO: 29332 - protein, 10 aa, Artificial Sequence
  Description of Artificial Sequence: Synthetic epitope
NAFGNTASQT

SEQ ID NO: 29333 - protein, 10 aa, Artificial Sequence
  Description of Artificial Sequence: Synthetic epitope
NAFLDKELKE

SEQ ID NO: 29334 - protein, 10 aa, Artificial Sequence
  Description of Artificial Sequence: Synthetic epitope
NAFLSEAVEG

SEQ ID NO: 29335 - protein, 10 aa, Artificial Sequence
  Description of Artificial Sequence: Synthetic epitope
NAFMMNSEFN

SEQ ID NO: 29336 - protein, 10 aa, Artificial Sequence
  Description of Artificial Sequence: Synthetic epitope
NAFTEEDSEL

SEQ ID NO: 29337 - protein, 10 aa, Artificial Sequence
  Description of Artificial Sequence: Synthetic epitope
NAGIQINLQS

SEQ ID NO: 29338 - protein, 10 aa, Artificial Sequence
  Description of Artificial Sequence: Synthetic epitope
NAGKDSTSRE

SEQ ID NO: 29339 - protein, 10 aa, Artificial Sequence
  Description of Artificial Sequence: Synthetic epitope
NAGSQLSQAM

SEQ ID NO: 29340 - protein, 10 aa, Artificial Sequence
  Description of Artificial Sequence: Synthetic epitope
NAHDNSEELE

SEQ ID NO: 29341 - protein, 10 aa, Artificial Sequence
  Description of Artificial Sequence: Synthetic epitope
NAHRGPAKVD

SEQ ID NO: 29342 - protein, 10 aa, Artificial Sequence
  Description of Artificial Sequence: Synthetic epitope
NAIDRAKSRG

SEQ ID NO: 29343 - protein, 10 aa, Artificial Sequence
  Description of Artificial Sequence: Synthetic epitope
NAIEGKSNTV

SEQ ID NO: 29344 - protein, 10 aa, Artificial Sequence
  Description of Artificial Sequence: Synthetic epitope
NAIEWSVKSG

SEQ ID NO: 29345 - protein, 10 aa, Artificial Sequence
  Description of Artificial Sequence: Synthetic epitope
NAIIKMVENR

SEQ ID NO: 29346 - protein, 10 aa, Artificial Sequence
  Description of Artificial Sequence: Synthetic epitope
NAIKYTKNVE

SEQ ID NO: 29347 - protein, 10 aa, Artificial Sequence
  Description of Artificial Sequence: Synthetic epitope
NAIMAIRRNR

SEQ ID NO: 29348 - protein, 10 aa, Artificial Sequence
  Description of Artificial Sequence: Synthetic epitope
NAIPVSKSTG

SEQ ID NO: 29349 - protein, 10 aa, Artificial Sequence
  Description of Artificial Sequence: Synthetic epitope
NAIQHSEFEE

SEQ ID NO: 29350 - protein, 10 aa, Artificial Sequence
  Description of Artificial Sequence: Synthetic epitope
NAITLGSAQA

SEQ ID NO: 29351 - protein, 10 aa, Artificial Sequence
  Description of Artificial Sequence: Synthetic epitope
NAIVKSKQHS

SEQ ID NO: 29352 - protein, 10 aa, Artificial Sequence
  Description of Artificial Sequence: Synthetic epitope
NAKDMNSLVY

SEQ ID NO: 29353 - protein, 10 aa, Artificial Sequence
  Description of Artificial Sequence: Synthetic epitope
NAKDQTEATQ

SEQ ID NO: 29354 - protein, 10 aa, Artificial Sequence
  Description of Artificial Sequence: Synthetic epitope
NAKEPKTRAG

SEQ ID NO: 29355 - protein, 10 aa, Artificial Sequence
  Description of Artificial Sequence: Synthetic epitope
NAKGTVTSTA

SEQ ID NO: 29356 - protein, 10 aa, Artificial Sequence
  Description of Artificial Sequence: Synthetic epitope
NAKIEKTQEE

SEQ ID NO: 29357 - protein, 10 aa, Artificial Sequence
  Description of Artificial Sequence: Synthetic epitope
NAKIQADIDY

SEQ ID NO: 29358 - protein, 10 aa, Artificial Sequence
  Description of Artificial Sequence: Synthetic epitope
NAKKDVVNTK

SEQ ID NO: 29359 - protein, 10 aa, Artificial Sequence
  Description of Artificial Sequence: Synthetic epitope
NAKLSELEAA

SEQ ID NO: 29360 - protein, 10 aa, Artificial Sequence
  Description of Artificial Sequence: Synthetic epitope
NAKMNKDVNS

SEQ ID NO: 29361 - protein, 10 aa, Artificial Sequence
  Description of Artificial Sequence: Synthetic epitope
NAKRKLSDDP

SEQ ID NO: 29362 - protein, 10 aa, Artificial Sequence
  Description of Artificial Sequence: Synthetic epitope
NAKTAYEWVN

SEQ ID NO: 29363 - protein, 10 aa, Artificial Sequence
  Description of Artificial Sequence: Synthetic epitope
NAKTSERASK

SEQ ID NO: 29364 - protein, 10 aa, Artificial Sequence
  Description of Artificial Sequence: Synthetic epitope
NALAEDISQQ

SEQ ID NO: 29365 - protein, 10 aa, Artificial Sequence
  Description of Artificial Sequence: Synthetic epitope
NALFKPTIDS

SEQ ID NO: 29366 - protein, 10 aa, Artificial Sequence
  Description of Artificial Sequence: Synthetic epitope
NALKNSNNHD

SEQ ID NO: 29367 - protein, 10 aa, Artificial Sequence
  Description of Artificial Sequence: Synthetic epitope
NALKQEEYSR

SEQ ID NO: 29368 - protein, 10 aa, Artificial Sequence
  Description of Artificial Sequence: Synthetic epitope
NALKTTLDEA

SEQ ID NO: 29369 - protein, 10 aa, Artificial Sequence
  Description of Artificial Sequence: Synthetic epitope
NALLRETSMK

SEQ ID NO: 29370 - protein, 10 aa, Artificial Sequence
  Description of Artificial Sequence: Synthetic epitope
NALLSNESSQ

SEQ ID NO: 29371 - protein, 10 aa, Artificial Sequence
  Description of Artificial Sequence: Synthetic epitope
NALQEKVQAV

SEQ ID NO: 29372 - protein, 10 aa, Artificial Sequence
  Description of Artificial Sequence: Synthetic epitope
NALQETRANK

SEQ ID NO: 29373 - protein, 10 aa, Artificial Sequence
  Description of Artificial Sequence: Synthetic epitope
NALQGMAEPR

SEQ ID NO: 29374 - protein, 10 aa, Artificial Sequence
  Description of Artificial Sequence: Synthetic epitope
NALQNKRAPK

SEQ ID NO: 29375 - protein, 10 aa, Artificial Sequence
  Description of Artificial Sequence: Synthetic epitope
NALRIARGTA

SEQ ID NO: 29376 - protein, 10 aa, Artificial Sequence
  Description of Artificial Sequence: Synthetic epitope
NALSLQLSNK

SEQ ID NO: 29377 - protein, 10 aa, Artificial Sequence
  Description of Artificial Sequence: Synthetic epitope
NALSQQVQQM

SEQ ID NO: 29378 - protein, 10 aa, Artificial Sequence
  Description of Artificial Sequence: Synthetic epitope
NALVERKQPL

SEQ ID NO: 29379 - protein, 10 aa, Artificial Sequence
  Description of Artificial Sequence: Synthetic epitope
NAMEEANEEI

SEQ ID NO: 29380 - protein, 10 aa, Artificial Sequence
  Description of Artificial Sequence: Synthetic epitope
NAMHQVTDSH

SEQ ID NO: 29381 - protein, 10 aa, Artificial Sequence
  Description of Artificial Sequence: Synthetic epitope
NAMILAGKAY

SEQ ID NO: 29382 - protein, 10 aa, Artificial Sequence
  Description of Artificial Sequence: Synthetic epitope
NAMKKNKHIK

SEQ ID NO: 29383 - protein, 10 aa, Artificial Sequence
  Description of Artificial Sequence: Synthetic epitope
NAMLVNLEEP

SEQ ID NO: 29384 - protein, 10 aa, Artificial Sequence
  Description of Artificial Sequence: Synthetic epitope
NAMSSVATDM

SEQ ID NO: 29385 - protein, 10 aa, Artificial Sequence
  Description of Artificial Sequence: Synthetic epitope
NANASPESSE

SEQ ID NO: 29386 - protein, 10 aa, Artificial Sequence
  Description of Artificial Sequence: Synthetic epitope
NANDVETVQQ

SEQ ID NO: 29387 - protein, 10 aa, Artificial Sequence
  Description of Artificial Sequence: Synthetic epitope
NANISIANKY

SEQ ID NO: 29388 - protein, 10 aa, Artificial Sequence
  Description of Artificial Sequence: Synthetic epitope
NANKTQKDTG

SEQ ID NO: 29389 - protein, 10 aa, Artificial Sequence
  Description of Artificial Sequence: Synthetic epitope
NANLSEDEKE

SEQ ID NO: 29390 - protein, 10 aa, Artificial Sequence
  Description of Artificial Sequence: Synthetic epitope
NANNRAAHLE

SEQ ID NO: 29391 - protein, 10 aa, Artificial Sequence
  Description of Artificial Sequence: Synthetic epitope
NANQLGLEVR

SEQ ID NO: 29392 - protein, 10 aa, Artificial Sequence
  Description of Artificial Sequence: Synthetic epitope
NANRDALVKE

SEQ ID NO: 29393 - protein, 10 aa, Artificial Sequence
  Description of Artificial Sequence: Synthetic epitope
NANSVALTQE

SEQ ID NO: 29394 - protein, 10 aa, Artificial Sequence
  Description of Artificial Sequence: Synthetic epitope
NANVPQIRQR

SEQ ID NO: 29395 - protein, 10 aa, Artificial Sequence
  Description of Artificial Sequence: Synthetic epitope
NANVSRQIED

SEQ ID NO: 29396 - protein, 10 aa, Artificial Sequence
  Description of Artificial Sequence: Synthetic epitope
NAPAAVDEGS

SEQ ID NO: 29397 - protein, 10 aa, Artificial Sequence
  Description of Artificial Sequence: Synthetic epitope
NAPNAMKPNS

SEQ ID NO: 29398 - protein, 10 aa, Artificial Sequence
  Description of Artificial Sequence: Synthetic epitope
NAPQISDGSE

SEQ ID NO: 29399 - protein, 10 aa, Artificial Sequence
  Description of Artificial Sequence: Synthetic epitope
NAPRAMGTSS

SEQ ID NO: 29400 - protein, 10 aa, Artificial Sequence
  Description of Artificial Sequence: Synthetic epitope
NAQAKVVKLE

SEQ ID NO: 29401 - protein, 10 aa, Artificial Sequence
  Description of Artificial Sequence: Synthetic epitope
NAQALASDHD

SEQ ID NO: 29402 - protein, 10 aa, Artificial Sequence
  Description of Artificial Sequence: Synthetic epitope
NAQARVIKLE

SEQ ID NO: 29403 - protein, 10 aa, Artificial Sequence
  Description of Artificial Sequence: Synthetic epitope
NAQATRSTPV

SEQ ID NO: 29404 - protein, 10 aa, Artificial Sequence
  Description of Artificial Sequence: Synthetic epitope
NAQDKQELHL

SEQ ID NO: 29405 - protein, 10 aa, Artificial Sequence
  Description of Artificial Sequence: Synthetic epitope
NAQEDTMETH

SEQ ID NO: 29406 - protein, 10 aa, Artificial Sequence
  Description of Artificial Sequence: Synthetic epitope
NAQELPSMYQ

SEQ ID NO: 29407 - protein, 10 aa, Artificial Sequence
  Description of Artificial Sequence: Synthetic epitope
NAQIQILTRS

SEQ ID NO: 29408 - protein, 10 aa, Artificial Sequence
  Description of Artificial Sequence: Synthetic epitope
NAQKQQVQFM

SEQ ID NO: 29409 - protein, 10 aa, Artificial Sequence
  Description of Artificial Sequence: Synthetic epitope
NAQKSFETTV

SEQ ID NO: 29410 - protein, 10 aa, Artificial Sequence
  Description of Artificial Sequence: Synthetic epitope
NAQLARDFQQ

SEQ ID NO: 29411 - protein, 10 aa, Artificial Sequence
  Description of Artificial Sequence: Synthetic epitope
NAQSLEKVQQ

SEQ ID NO: 29412 - protein, 10 aa, Artificial Sequence
  Description of Artificial Sequence: Synthetic epitope
NARAAVLKEQ

SEQ ID NO: 29413 - protein, 10 aa, Artificial Sequence
  Description of Artificial Sequence: Synthetic epitope
NARENSQMNE

SEQ ID NO: 29414 - protein, 10 aa, Artificial Sequence
  Description of Artificial Sequence: Synthetic epitope
NARLTSEVTG

SEQ ID NO: 29415 - protein, 10 aa, Artificial Sequence
  Description of Artificial Sequence: Synthetic epitope
NARTALLKNI

SEQ ID NO: 29416 - protein, 10 aa, Artificial Sequence
  Description of Artificial Sequence: Synthetic epitope
NASAHSQSVA

SEQ ID NO: 29417 - protein, 10 aa, Artificial Sequence
  Description of Artificial Sequence: Synthetic epitope
NASANATADF

SEQ ID NO: 29418 - protein, 10 aa, Artificial Sequence
  Description of Artificial Sequence: Synthetic epitope
NASANKLESL

SEQ ID NO: 29419 - protein, 10 aa, Artificial Sequence
  Description of Artificial Sequence: Synthetic epitope
NASASAVAET

SEQ ID NO: 29420 - protein, 10 aa, Artificial Sequence
  Description of Artificial Sequence: Synthetic epitope
NASDLKAASG

SEQ ID NO: 29421 - protein, 10 aa, Artificial Sequence
  Description of Artificial Sequence: Synthetic epitope
NASEEDKIKA

SEQ ID NO: 29422 - protein, 10 aa, Artificial Sequence
  Description of Artificial Sequence: Synthetic epitope
NASIADSSEN

SEQ ID NO: 29423 - protein, 10 aa, Artificial Sequence
  Description of Artificial Sequence: Synthetic epitope
NASKGNRVSV

SEQ ID NO: 29424 - protein, 10 aa, Artificial Sequence
  Description of Artificial Sequence: Synthetic epitope
NASKTLNANN

SEQ ID NO: 29425 - protein, 10 aa, Artificial Sequence
  Description of Artificial Sequence: Synthetic epitope
NASKYSRTNL

SEQ ID NO: 29426 - protein, 10 aa, Artificial Sequence
  Description of Artificial Sequence: Synthetic epitope
NASRKSNILF

SEQ ID NO: 29427 - protein, 10 aa, Artificial Sequence
  Description of Artificial Sequence: Synthetic epitope
NASSHSASEE

SEQ ID NO: 29428 - protein, 10 aa, Artificial Sequence
  Description of Artificial Sequence: Synthetic epitope
NASSYKATTR

SEQ ID NO: 29429 - protein, 10 aa, Artificial Sequence
  Description of Artificial Sequence: Synthetic epitope
NASTDSLAKD

SEQ ID NO: 29430 - protein, 10 aa, Artificial Sequence
  Description of Artificial Sequence: Synthetic epitope
NASTMGDLRN

SEQ ID NO: 29431 - protein, 10 aa, Artificial Sequence
  Description of Artificial Sequence: Synthetic epitope
NASVSISHNS

SEQ ID NO: 29432 - protein, 10 aa, Artificial Sequence
  Description of Artificial Sequence: Synthetic epitope
NASYKHPYRQ

SEQ ID NO: 29433 - protein, 10 aa, Artificial Sequence
  Description of Artificial Sequence: Synthetic epitope
NATASEYTWN

SEQ ID NO: 29434 - protein, 10 aa, Artificial Sequence
  Description of Artificial Sequence: Synthetic epitope
NATATRKLTI

SEQ ID NO: 29435 - protein, 10 aa, Artificial Sequence
  Description of Artificial Sequence: Synthetic epitope
NATDNHVHSM

SEQ ID NO: 29436 - protein, 10 aa, Artificial Sequence
  Description of Artificial Sequence: Synthetic epitope
NATEDQHEPT

SEQ ID NO: 29437 - protein, 10 aa, Artificial Sequence
  Description of Artificial Sequence: Synthetic epitope
NATEESDALA

SEQ ID NO: 29438 - protein, 10 aa, Artificial Sequence
  Description of Artificial Sequence: Synthetic epitope
NATEHNSGTS

SEQ ID NO: 29439 - protein, 10 aa, Artificial Sequence
  Description of Artificial Sequence: Synthetic epitope
NATEREQEEN

SEQ ID NO: 29440 - protein, 10 aa, Artificial Sequence
  Description of Artificial Sequence: Synthetic epitope
NATKTKLKQK

SEQ ID NO: 29441 - protein, 10 aa, Artificial Sequence
  Description of Artificial Sequence: Synthetic epitope
NATKVKTHSS

SEQ ID NO: 29442 - protein, 10 aa, Artificial Sequence
  Description of Artificial Sequence: Synthetic epitope
NATLSSLESK

SEQ ID NO: 29443 - protein, 10 aa, Artificial Sequence
  Description of Artificial Sequence: Synthetic epitope
NATMSLMNKN

SEQ ID NO: 29444 - protein, 10 aa, Artificial Sequence
  Description of Artificial Sequence: Synthetic epitope
NATNLKLKKI

SEQ ID NO: 29445 - protein, 10 aa, Artificial Sequence
  Description of Artificial Sequence: Synthetic epitope
NATRAAVEEG

SEQ ID NO: 29446 - protein, 10 aa, Artificial Sequence
  Description of Artificial Sequence: Synthetic epitope
NATRVENVHS

SEQ ID NO: 29447 - protein, 10 aa, Artificial Sequence
  Description of Artificial Sequence: Synthetic epitope
NATSVASHTP

SEQ ID NO: 29448 - protein, 10 aa, Artificial Sequence
  Description of Artificial Sequence: Synthetic epitope
NATTIQARGD

SEQ ID NO: 29449 - protein, 10 aa, Artificial Sequence
  Description of Artificial Sequence: Synthetic epitope
NATTLDINLS

SEQ ID NO: 29450 - protein, 10 aa, Artificial Sequence
  Description of Artificial Sequence: Synthetic epitope
NATVLDVAQT

SEQ ID NO: 29451 - protein, 10 aa, Artificial Sequence
  Description of Artificial Sequence: Synthetic epitope
NAVANAAIQH

SEQ ID NO: 29452 - protein, 10 aa, Artificial Sequence
  Description of Artificial Sequence: Synthetic epitope
NAVEKVNIKP

SEQ ID NO: 29453 - protein, 10 aa, Artificial Sequence
  Description of Artificial Sequence: Synthetic epitope
NAVLMQELMA

SEQ ID NO: 29454 - protein, 10 aa, Artificial Sequence
  Description of Artificial Sequence: Synthetic epitope
NAVLQKVSHM

SEQ ID NO: 29455 - protein, 10 aa, Artificial Sequence
  Description of Artificial Sequence: Synthetic epitope
NAVLTKKFQV

SEQ ID NO: 29456 - protein, 10 aa, Artificial Sequence
  Description of Artificial Sequence: Synthetic epitope
NAVMKVIDPA

SEQ ID NO: 29457 - protein, 10 aa, Artificial Sequence
  Description of Artificial Sequence: Synthetic epitope
NAVQASAEHQ

SEQ ID NO: 29458 - protein, 10 aa, Artificial Sequence
  Description of Artificial Sequence: Synthetic epitope
NAVTSLTPPS

SEQ ID NO: 29459 - protein, 10 aa, Artificial Sequence
  Description of Artificial Sequence: Synthetic epitope
NAVTTMASQP

SEQ ID NO: 29460 - protein, 10 aa, Artificial Sequence
  Description of Artificial Sequence: Synthetic epitope
NAVVAKIQAK

SEQ ID NO: 29461 - protein, 10 aa, Artificial Sequence
  Description of Artificial Sequence: Synthetic epitope
NAVVQILRLH

SEQ ID NO: 29462 - protein, 10 aa, Artificial Sequence
  Description of Artificial Sequence: Synthetic epitope
NAVVSDLSEK

SEQ ID NO: 29463 - protein, 10 aa, Artificial Sequence
  Description of Artificial Sequence: Synthetic epitope
NAWAQKAASG

SEQ ID NO: 29464 - protein, 10 aa, Artificial Sequence
  Description of Artificial Sequence: Synthetic epitope
NAWESGTAPT

SEQ ID NO: 29465 - protein, 10 aa, Artificial Sequence
  Description of Artificial Sequence: Synthetic epitope
NAWFRKSRFK

SEQ ID NO: 29466 - protein, 10 aa, Artificial Sequence
  Description of Artificial Sequence: Synthetic epitope
NAWVSAVTLT

SEQ ID NO: 29467 - protein, 10 aa, Artificial Sequence
  Description of Artificial Sequence: Synthetic epitope
NAYATLIEND

SEQ ID NO: 29468 - protein, 10 aa, Artificial Sequence
  Description of Artificial Sequence: Synthetic epitope
NAYAVAVANY

SEQ ID NO: 29469 - protein, 10 aa, Artificial Sequence
  Description of Artificial Sequence: Synthetic epitope
NAYKKEMASF

SEQ ID NO: 29470 - protein, 10 aa, Artificial Sequence
  Description of Artificial Sequence: Synthetic epitope
NAYKSKLHKA

SEQ ID NO: 29471 - protein, 10 aa, Artificial Sequence
  Description of Artificial Sequence: Synthetic epitope
NAYQNSNLSV

SEQ ID NO: 29472 - protein, 10 aa, Artificial Sequence
  Description of Artificial Sequence: Synthetic epitope
NAYQSKIKMQ

SEQ ID NO: 29473 - protein, 10 aa, Artificial Sequence
  Description of Artificial Sequence: Synthetic epitope
NAYRNKERVK

SEQ ID NO: 29474 - protein, 10 aa, Artificial Sequence
  Description of Artificial Sequence: Synthetic epitope
NDAASHTSTM

SEQ ID NO: 29475 - protein, 10 aa, Artificial Sequence
  Description of Artificial Sequence: Synthetic epitope
NDAASRVAAD

SEQ ID NO: 29476 - protein, 10 aa, Artificial Sequence
  Description of Artificial Sequence: Synthetic epitope
NDADSADIST

SEQ ID NO: 29477 - protein, 10 aa, Artificial Sequence
  Description of Artificial Sequence: Synthetic epitope
NDAEVAALLE

SEQ ID NO: 29478 - protein, 10 aa, Artificial Sequence
  Description of Artificial Sequence: Synthetic epitope
NDAIANTLNE

SEQ ID NO: 29479 - protein, 10 aa, Artificial Sequence
  Description of Artificial Sequence: Synthetic epitope
NDAIEKARKA

SEQ ID NO: 29480 - protein, 10 aa, Artificial Sequence
  Description of Artificial Sequence: Synthetic epitope
NDAKSVSKQY

SEQ ID NO: 29481 - protein, 10 aa, Artificial Sequence
  Description of Artificial Sequence: Synthetic epitope
NDAMLMAVQL

SEQ ID NO: 29482 - protein, 10 aa, Artificial Sequence
  Description of Artificial Sequence: Synthetic epitope
NDANSAARAR

SEQ ID NO: 29483 - protein, 10 aa, Artificial Sequence
  Description of Artificial Sequence: Synthetic epitope
NDASEGSTKA

SEQ ID NO: 29484 - protein, 10 aa, Artificial Sequence
  Description of Artificial Sequence: Synthetic epitope
NDASSAKDVD

SEQ ID NO: 29485 - protein, 10 aa, Artificial Sequence
  Description of Artificial Sequence: Synthetic epitope
NDASSMLASA

SEQ ID NO: 29486 - protein, 10 aa, Artificial Sequence
  Description of Artificial Sequence: Synthetic epitope
NDAVNISNEA

SEQ ID NO: 29487 - protein, 10 aa, Artificial Sequence
  Description of Artificial Sequence: Synthetic epitope
NDDLTNAGYS

SEQ ID NO: 29488 - protein, 10 aa, Artificial Sequence
  Description of Artificial Sequence: Synthetic epitope
NDEALRQLEA

SEQ ID NO: 29489 - protein, 10 aa, Artificial Sequence
  Description of Artificial Sequence: Synthetic epitope
NDEEKEKEAK

SEQ ID NO: 29490 - protein, 10 aa, Artificial Sequence
  Description of Artificial Sequence: Synthetic epitope
NDEELITQQL

SEQ ID NO: 29491 - protein, 10 aa, Artificial Sequence
  Description of Artificial Sequence: Synthetic epitope
NDEHKTMASR

SEQ ID NO: 29492 - protein, 10 aa, Artificial Sequence
  Description of Artificial Sequence: Synthetic epitope
NDEHVTVPPW

SEQ ID NO: 29493 - protein, 10 aa, Artificial Sequence
  Description of Artificial Sequence: Synthetic epitope
NDENEEKENN

SEQ ID NO: 29494 - protein, 10 aa, Artificial Sequence
  Description of Artificial Sequence: Synthetic epitope
NDENRRTYQN

SEQ ID NO: 29495 - protein, 10 aa, Artificial Sequence
  Description of Artificial Sequence: Synthetic epitope
NDETERQRKF

SEQ ID NO: 29496 - protein, 10 aa, Artificial Sequence
  Description of Artificial Sequence: Synthetic epitope
NDETKALTPA

SEQ ID NO: 29497 - protein, 10 aa, Artificial Sequence
  Description of Artificial Sequence: Synthetic epitope
NDETNLETST

SEQ ID NO: 29498 - protein, 10 aa, Artificial Sequence
  Description of Artificial Sequence: Synthetic epitope
NDETPQQVFQ

SEQ ID NO: 29499 - protein, 10 aa, Artificial Sequence
  Description of Artificial Sequence: Synthetic epitope
NDFEKESRLG

SEQ ID NO: 29500 - protein, 10 aa, Artificial Sequence
  Description of Artificial Sequence: Synthetic epitope
NDFIVALSSV

SEQ ID NO: 29501 - protein, 10 aa, Artificial Sequence
  Description of Artificial Sequence: Synthetic epitope
NDFLAVMTQK

SEQ ID NO: 29502 - protein, 10 aa, Artificial Sequence
  Description of Artificial Sequence: Synthetic epitope
NDFLSRKAQD

SEQ ID NO: 29503 - protein, 10 aa, Artificial Sequence
  Description of Artificial Sequence: Synthetic epitope
NDFQKRNREE

SEQ ID NO: 29504 - protein, 10 aa, Artificial Sequence
  Description of Artificial Sequence: Synthetic epitope
NDFSASITDI

SEQ ID NO: 29505 - protein, 10 aa, Artificial Sequence
  Description of Artificial Sequence: Synthetic epitope
NDFSASITDI

SEQ ID NO: 29506 - protein, 10 aa, Artificial Sequence
  Description of Artificial Sequence: Synthetic epitope
NDFVKLSSQK

SEQ ID NO: 29507 - protein, 10 aa, Artificial Sequence
  Description of Artificial Sequence: Synthetic epitope
NDGFDDRMRD

SEQ ID NO: 29508 - protein, 10 aa, Artificial Sequence
  Description of Artificial Sequence: Synthetic epitope
NDGSAVSKKE

SEQ ID NO: 29509 - protein, 10 aa, Artificial Sequence
  Description of Artificial Sequence: Synthetic epitope
NDHANREAEL

SEQ ID NO: 29510 - protein, 10 aa, Artificial Sequence
  Description of Artificial Sequence: Synthetic epitope
NDHHSEADEE

SEQ ID NO: 29511 - protein, 10 aa, Artificial Sequence
  Description of Artificial Sequence: Synthetic epitope
NDHKAVMKQV

SEQ ID NO: 29512 - protein, 10 aa, Artificial Sequence
  Description of Artificial Sequence: Synthetic epitope
NDHNKIIQEK

SEQ ID NO: 29513 - protein, 10 aa, Artificial Sequence
  Description of Artificial Sequence: Synthetic epitope
NDHSSALQNI

SEQ ID NO: 29514 - protein, 10 aa, Artificial Sequence
  Description of Artificial Sequence: Synthetic epitope
NDHSSGTKET

SEQ ID NO: 29515 - protein, 10 aa, Artificial Sequence
  Description of Artificial Sequence: Synthetic epitope
NDIEVASNIT

SEQ ID NO: 29516 - protein, 10 aa, Artificial Sequence
  Description of Artificial Sequence: Synthetic epitope
NDIKSTIDAS

SEQ ID NO: 29517 - protein, 10 aa, Artificial Sequence
  Description of Artificial Sequence: Synthetic epitope
NDIMPMIGAR

SEQ ID NO: 29518 - protein, 10 aa, Artificial Sequence
  Description of Artificial Sequence: Synthetic epitope
NDISQRRFLV

SEQ ID NO: 29519 - protein, 10 aa, Artificial Sequence
  Description of Artificial Sequence: Synthetic epitope
NDISQRRFLV

SEQ ID NO: 29520 - protein, 10 aa, Artificial Sequence
  Description of Artificial Sequence: Synthetic epitope
NDISRKSEGL

SEQ ID NO: 29521 - protein, 10 aa, Artificial Sequence
  Description of Artificial Sequence: Synthetic epitope
NDITADVYSE

SEQ ID NO: 29522 - protein, 10 aa, Artificial Sequence
  Description of Artificial Sequence: Synthetic epitope
NDKASMLQEY

SEQ ID NO: 29523 - protein, 10 aa, Artificial Sequence
  Description of Artificial Sequence: Synthetic epitope
NDKATQTPLS

SEQ ID NO: 29524 - protein, 10 aa, Artificial Sequence
  Description of Artificial Sequence: Synthetic epitope
NDKEEALAHQ

SEQ ID NO: 29525 - protein, 10 aa, Artificial Sequence
  Description of Artificial Sequence: Synthetic epitope
NDKEQGNEKT

SEQ ID NO: 29526 - protein, 10 aa, Artificial Sequence
  Description of Artificial Sequence: Synthetic epitope
NDKLEISSNL

SEQ ID NO: 29527 - protein, 10 aa, Artificial Sequence
  Description of Artificial Sequence: Synthetic epitope
NDKLQDDSEM

SEQ ID NO: 29528 - protein, 10 aa, Artificial Sequence
  Description of Artificial Sequence: Synthetic epitope
NDKLSKTEKE

SEQ ID NO: 29529 - protein, 10 aa, Artificial Sequence
  Description of Artificial Sequence: Synthetic epitope
NDKSMSGNKF

SEQ ID NO: 29530 - protein, 10 aa, Artificial Sequence
  Description of Artificial Sequence: Synthetic epitope
NDKTSVSFSS

SEQ ID NO: 29531 - protein, 10 aa, Artificial Sequence
  Description of Artificial Sequence: Synthetic epitope
NDKVETEQAE

SEQ ID NO: 29532 - protein, 10 aa, Artificial Sequence
  Description of Artificial Sequence: Synthetic epitope
NDLAKSSEGE

SEQ ID NO: 29533 - protein, 10 aa, Artificial Sequence
  Description of Artificial Sequence: Synthetic epitope
NDLDASKFSA

SEQ ID NO: 29534 - protein, 10 aa, Artificial Sequence
  Description of Artificial Sequence: Synthetic epitope
NDLDTKATPS

SEQ ID NO: 29535 - protein, 10 aa, Artificial Sequence
  Description of Artificial Sequence: Synthetic epitope
NDLKAKSASI

SEQ ID NO: 29536 - protein, 10 aa, Artificial Sequence
  Description of Artificial Sequence: Synthetic epitope
NDLKTQKMGQ

SEQ ID NO: 29537 - protein, 10 aa, Artificial Sequence
  Description of Artificial Sequence: Synthetic epitope
NDLLASAKKD

SEQ ID NO: 29538 - protein, 10 aa, Artificial Sequence
  Description of Artificial Sequence: Synthetic epitope
NDLLKLNSEL

SEQ ID NO: 29539 - protein, 10 aa, Artificial Sequence
  Description of Artificial Sequence: Synthetic epitope
NDLNMKAVEQ

SEQ ID NO: 29540 - protein, 10 aa, Artificial Sequence
  Description of Artificial Sequence: Synthetic epitope
NDLSLTRDEQ

SEQ ID NO: 29541 - protein, 10 aa, Artificial Sequence
  Description of Artificial Sequence: Synthetic epitope
NDLTAEVAGS

SEQ ID NO: 29542 - protein, 10 aa, Artificial Sequence
  Description of Artificial Sequence: Synthetic epitope
NDLTAEVAGS

SEQ ID NO: 29543 - protein, 10 aa, Artificial Sequence
  Description of Artificial Sequence: Synthetic epitope
NDLVALQMNR

SEQ ID NO: 29544 - protein, 10 aa, Artificial Sequence
  Description of Artificial Sequence: Synthetic epitope
NDMKHMSQNQ

SEQ ID NO: 29545 - protein, 10 aa, Artificial Sequence
  Description of Artificial Sequence: Synthetic epitope
NDNFNISKKD

SEQ ID NO: 29546 - protein, 10 aa, Artificial Sequence
  Description of Artificial Sequence: Synthetic epitope
NDNRERQEHN

SEQ ID NO: 29547 - protein, 10 aa, Artificial Sequence
  Description of Artificial Sequence: Synthetic epitope
NDNVTNTANE

SEQ ID NO: 29548 - protein, 10 aa, Artificial Sequence
  Description of Artificial Sequence: Synthetic epitope
NDPNAQGDAF

SEQ ID NO: 29549 - protein, 10 aa, Artificial Sequence
  Description of Artificial Sequence: Synthetic epitope
NDPRTLKAVQ

SEQ ID NO: 29550 - protein, 10 aa, Artificial Sequence
  Description of Artificial Sequence: Synthetic epitope
NDPSYSKSSN

SEQ ID NO: 29551 - protein, 10 aa, Artificial Sequence
  Description of Artificial Sequence: Synthetic epitope
NDPTQVVLAA

SEQ ID NO: 29552 - protein, 10 aa, Artificial Sequence
  Description of Artificial Sequence: Synthetic epitope
NDQAKGESHE

SEQ ID NO: 29553 - protein, 10 aa, Artificial Sequence
  Description of Artificial Sequence: Synthetic epitope
NDQFGLSHFN

SEQ ID NO: 29554 - protein, 10 aa, Artificial Sequence
  Description of Artificial Sequence: Synthetic epitope
NDQGESLIRT

SEQ ID NO: 29555 - protein, 10 aa, Artificial Sequence
  Description of Artificial Sequence: Synthetic epitope
NDQKGSASLT

SEQ ID NO: 29556 - protein, 10 aa, Artificial Sequence
  Description of Artificial Sequence: Synthetic epitope
NDREAYKMAW

SEQ ID NO: 29557 - protein, 10 aa, Artificial Sequence
  Description of Artificial Sequence: Synthetic epitope
NDRFQQRIFD

SEQ ID NO: 29558 - protein, 10 aa, Artificial Sequence
  Description of Artificial Sequence: Synthetic epitope
NDRGEIVKTK

SEQ ID NO: 29559 - protein, 10 aa, Artificial Sequence
  Description of Artificial Sequence: Synthetic epitope
NDRNEFEEQA

SEQ ID NO: 29560 - protein, 10 aa, Artificial Sequence
  Description of Artificial Sequence: Synthetic epitope
NDRRNRKFKE

SEQ ID NO: 29561 - protein, 10 aa, Artificial Sequence
  Description of Artificial Sequence: Synthetic epitope
NDRTQTWVKS

SEQ ID NO: 29562 - protein, 10 aa, Artificial Sequence
  Description of Artificial Sequence: Synthetic epitope
NDSAKKMSDN

SEQ ID NO: 29563 - protein, 10 aa, Artificial Sequence
  Description of Artificial Sequence: Synthetic epitope
NDSDHQSSTS

SEQ ID NO: 29564 - protein, 10 aa, Artificial Sequence
  Description of Artificial Sequence: Synthetic epitope
NDSETVYKRQ

SEQ ID NO: 29565 - protein, 10 aa, Artificial Sequence
  Description of Artificial Sequence: Synthetic epitope
NDSFISIQPS

SEQ ID NO: 29566 - protein, 10 aa, Artificial Sequence
  Description of Artificial Sequence: Synthetic epitope
NDSINLDWMF

SEQ ID NO: 29567 - protein, 10 aa, Artificial Sequence
  Description of Artificial Sequence: Synthetic epitope
NDSIQAQKND

SEQ ID NO: 29568 - protein, 10 aa, Artificial Sequence
  Description of Artificial Sequence: Synthetic epitope
NDSKVVTSSF

SEQ ID NO: 29569 - protein, 10 aa, Artificial Sequence
  Description of Artificial Sequence: Synthetic epitope
NDSLQSISLM

SEQ ID NO: 29570 - protein, 10 aa, Artificial Sequence
  Description of Artificial Sequence: Synthetic epitope
NDSQVTMDDT

SEQ ID NO: 29571 - protein, 10 aa, Artificial Sequence
  Description of Artificial Sequence: Synthetic epitope
NDSSEIEYEQ

SEQ ID NO: 29572 - protein, 10 aa, Artificial Sequence
  Description of Artificial Sequence: Synthetic epitope
NDSSKQGYSQ

SEQ ID NO: 29573 - protein, 10 aa, Artificial Sequence
  Description of Artificial Sequence: Synthetic epitope
NDSSNVAMLQ

SEQ ID NO: 29574 - protein, 10 aa, Artificial Sequence
  Description of Artificial Sequence: Synthetic epitope
NDSSRFYAMF

SEQ ID NO: 29575 - protein, 10 aa, Artificial Sequence
  Description of Artificial Sequence: Synthetic epitope
NDSVSSETKA

SEQ ID NO: 29576 - protein, 10 aa, Artificial Sequence
  Description of Artificial Sequence: Synthetic epitope
NDTAKTTFQE

SEQ ID NO: 29577 - protein, 10 aa, Artificial Sequence
  Description of Artificial Sequence: Synthetic epitope
NDTEKSTTRV

SEQ ID NO: 29578 - protein, 10 aa, Artificial Sequence
  Description of Artificial Sequence: Synthetic epitope
NDTIAAKQEK

SEQ ID NO: 29579 - protein, 10 aa, Artificial Sequence
  Description of Artificial Sequence: Synthetic epitope
NDTMSNAQRS

SEQ ID NO: 29580 - protein, 10 aa, Artificial Sequence
  Description of Artificial Sequence: Synthetic epitope
NDTMTVRLST

SEQ ID NO: 29581 - protein, 10 aa, Artificial Sequence
  Description of Artificial Sequence: Synthetic epitope
NDTNLINSSA

SEQ ID NO: 29582 - protein, 10 aa, Artificial Sequence
  Description of Artificial Sequence: Synthetic epitope
NDTSAQAYHS

SEQ ID NO: 29583 - protein, 10 aa, Artificial Sequence
  Description of Artificial Sequence: Synthetic epitope
NDTSSLETER

SEQ ID NO: 29584 - protein, 10 aa, Artificial Sequence
  Description of Artificial Sequence: Synthetic epitope
NDTTATVEYP

SEQ ID NO: 29585 - protein, 10 aa, Artificial Sequence
  Description of Artificial Sequence: Synthetic epitope
NDTYNDMATL

SEQ ID NO: 29586 - protein, 10 aa, Artificial Sequence
  Description of Artificial Sequence: Synthetic epitope
NDVISSLKNR

SEQ ID NO: 29587 - protein, 10 aa, Artificial Sequence
  Description of Artificial Sequence: Synthetic epitope
NDVTEVRAMQ

SEQ ID NO: 29588 - protein, 10 aa, Artificial Sequence
  Description of Artificial Sequence: Synthetic epitope
NDVVGSSISK

SEQ ID NO: 29589 - protein, 10 aa, Artificial Sequence
  Description of Artificial Sequence: Synthetic epitope
NDYEKDNMKI

SEQ ID NO: 29590 - protein, 10 aa, Artificial Sequence
  Description of Artificial Sequence: Synthetic epitope
NEAAKLNQKD

SEQ ID NO: 29591 - protein, 10 aa, Artificial Sequence
  Description of Artificial Sequence: Synthetic epitope
NEAASKNKQM

SEQ ID NO: 29592 - protein, 10 aa, Artificial Sequence
  Description of Artificial Sequence: Synthetic epitope
NEAGDERMLA

SEQ ID NO: 29593 - protein, 10 aa, Artificial Sequence
  Description of Artificial Sequence: Synthetic epitope
NEAIEKSLGG

SEQ ID NO: 29594 - protein, 10 aa, Artificial Sequence
  Description of Artificial Sequence: Synthetic epitope
NEAIKLAKGQ

SEQ ID NO: 29595 - protein, 10 aa, Artificial Sequence
  Description of Artificial Sequence: Synthetic epitope
NEAIVAVQAI

SEQ ID NO: 29596 - protein, 10 aa, Artificial Sequence
  Description of Artificial Sequence: Synthetic epitope
NEAKDLLETT

SEQ ID NO: 29597 - protein, 10 aa, Artificial Sequence
  Description of Artificial Sequence: Synthetic epitope
NEAKDVSSII

SEQ ID NO: 29598 - protein, 10 aa, Artificial Sequence
  Description of Artificial Sequence: Synthetic epitope
NEAKQQLLQQ

SEQ ID NO: 29599 - protein, 10 aa, Artificial Sequence
  Description of Artificial Sequence: Synthetic epitope
NEALRESGSQ

SEQ ID NO: 29600 - protein, 10 aa, Artificial Sequence
  Description of Artificial Sequence: Synthetic epitope
NEANISTLLR

SEQ ID NO: 29601 - protein, 10 aa, Artificial Sequence
  Description of Artificial Sequence: Synthetic epitope
NEAPLSLIDS

SEQ ID NO: 29602 - protein, 10 aa, Artificial Sequence
  Description of Artificial Sequence: Synthetic epitope
NEAQEAASSD

SEQ ID NO: 29603 - protein, 10 aa, Artificial Sequence
  Description of Artificial Sequence: Synthetic epitope
NEAQEAASSD

SEQ ID NO: 29604 - protein, 10 aa, Artificial Sequence
  Description of Artificial Sequence: Synthetic epitope
NEAQVDFRER

SEQ ID NO: 29605 - protein, 10 aa, Artificial Sequence
  Description of Artificial Sequence: Synthetic epitope
NEASKSSVAV

SEQ ID NO: 29606 - protein, 10 aa, Artificial Sequence
  Description of Artificial Sequence: Synthetic epitope
NEASNAIDSG

SEQ ID NO: 29607 - protein, 10 aa, Artificial Sequence
  Description of Artificial Sequence: Synthetic epitope
NEASYMSILG

SEQ ID NO: 29608 - protein, 10 aa, Artificial Sequence
  Description of Artificial Sequence: Synthetic epitope
NEASYMSILG

SEQ ID NO: 29609 - protein, 10 aa, Artificial Sequence
  Description of Artificial Sequence: Synthetic epitope
NEATERHQER

SEQ ID NO: 29610 - protein, 10 aa, Artificial Sequence
  Description of Artificial Sequence: Synthetic epitope
NEAWASLPAE

SEQ ID NO: 29611 - protein, 10 aa, Artificial Sequence
  Description of Artificial Sequence: Synthetic epitope
NEDASNENSE

SEQ ID NO: 29612 - protein, 10 aa, Artificial Sequence
  Description of Artificial Sequence: Synthetic epitope
NEDDAKAARD

SEQ ID NO: 29613 - protein, 10 aa, Artificial Sequence
  Description of Artificial Sequence: Synthetic epitope
NEDGEMTGEK

SEQ ID NO: 29614 - protein, 10 aa, Artificial Sequence
  Description of Artificial Sequence: Synthetic epitope
NEDIEFIEID

SEQ ID NO: 29615 - protein, 10 aa, Artificial Sequence
  Description of Artificial Sequence: Synthetic epitope
NEDISVATKL

SEQ ID NO: 29616 - protein, 10 aa, Artificial Sequence
  Description of Artificial Sequence: Synthetic epitope
NEDMAIEAQQ

SEQ ID NO: 29617 - protein, 10 aa, Artificial Sequence
  Description of Artificial Sequence: Synthetic epitope
NEDNVERDIQ

SEQ ID NO: 29618 - protein, 10 aa, Artificial Sequence
  Description of Artificial Sequence: Synthetic epitope
NEDSAASLTE

SEQ ID NO: 29619 - protein, 10 aa, Artificial Sequence
  Description of Artificial Sequence: Synthetic epitope
NEDSKSLEKV

SEQ ID NO: 29620 - protein, 10 aa, Artificial Sequence
  Description of Artificial Sequence: Synthetic epitope
NEDSTSVETQ

SEQ ID NO: 29621 - protein, 10 aa, Artificial Sequence
  Description of Artificial Sequence: Synthetic epitope
NEDVDARVIE

SEQ ID NO: 29622 - protein, 10 aa, Artificial Sequence
  Description of Artificial Sequence: Synthetic epitope
NEDVNEQVMQ

SEQ ID NO: 29623 - protein, 10 aa, Artificial Sequence
  Description of Artificial Sequence: Synthetic epitope
NEDYSRMIET

SEQ ID NO: 29624 - protein, 10 aa, Artificial Sequence
  Description of Artificial Sequence: Synthetic epitope
NEEAEKAAEA

SEQ ID NO: 29625 - protein, 10 aa, Artificial Sequence
  Description of Artificial Sequence: Synthetic epitope
NEEKISLQSE

SEQ ID NO: 29626 - protein, 10 aa, Artificial Sequence
  Description of Artificial Sequence: Synthetic epitope
NEELLSKQKQ

SEQ ID NO: 29627 - protein, 10 aa, Artificial Sequence
  Description of Artificial Sequence: Synthetic epitope
NEELRSIELE

SEQ ID NO: 29628 - protein, 10 aa, Artificial Sequence
  Description of Artificial Sequence: Synthetic epitope
NEENMTELLS

SEQ ID NO: 29629 - protein, 10 aa, Artificial Sequence
  Description of Artificial Sequence: Synthetic epitope
NEEQLISKLQ

SEQ ID NO: 29630 - protein, 10 aa, Artificial Sequence
  Description of Artificial Sequence: Synthetic epitope
NEEQVIKSQS

SEQ ID NO: 29631 - protein, 10 aa, Artificial Sequence
  Description of Artificial Sequence: Synthetic epitope
NEERNKGQVQ

SEQ ID NO: 29632 - protein, 10 aa, Artificial Sequence
  Description of Artificial Sequence: Synthetic epitope
NEERQDTDMQ

SEQ ID NO: 29633 - protein, 10 aa, Artificial Sequence
  Description of Artificial Sequence: Synthetic epitope
NEERVSAQKE

SEQ ID NO: 29634 - protein, 10 aa, Artificial Sequence
  Description of Artificial Sequence: Synthetic epitope
NEESDNEKET

SEQ ID NO: 29635 - protein, 10 aa, Artificial Sequence
  Description of Artificial Sequence: Synthetic epitope
NEESLLKSTN

SEQ ID NO: 29636 - protein, 10 aa, Artificial Sequence
  Description of Artificial Sequence: Synthetic epitope
NEESRLTASS

SEQ ID NO: 29637 - protein, 10 aa, Artificial Sequence
  Description of Artificial Sequence: Synthetic epitope
NEETESPSQE

SEQ ID NO: 29638 - protein, 10 aa, Artificial Sequence
  Description of Artificial Sequence: Synthetic epitope
NEETKAEKVG

SEQ ID NO: 29639 - protein, 10 aa, Artificial Sequence
  Description of Artificial Sequence: Synthetic epitope
NEETQVRTEM

SEQ ID NO: 29640 - protein, 10 aa, Artificial Sequence
  Description of Artificial Sequence: Synthetic epitope
NEEVGISNLK

SEQ ID NO: 29641 - protein, 10 aa, Artificial Sequence
  Description of Artificial Sequence: Synthetic epitope
NEFERLAARQ

SEQ ID NO: 29642 - protein, 10 aa, Artificial Sequence
  Description of Artificial Sequence: Synthetic epitope
NEFFTHAAQS

SEQ ID NO: 29643 - protein, 10 aa, Artificial Sequence
  Description of Artificial Sequence: Synthetic epitope
NEFGHHKIDV

SEQ ID NO: 29644 - protein, 10 aa, Artificial Sequence
  Description of Artificial Sequence: Synthetic epitope
NEFTASIAIR

SEQ ID NO: 29645 - protein, 10 aa, Artificial Sequence
  Description of Artificial Sequence: Synthetic epitope
NEFVEVVIEG

SEQ ID NO: 29646 - protein, 10 aa, Artificial Sequence
  Description of Artificial Sequence: Synthetic epitope
NEGDSSLATD

SEQ ID NO: 29647 - protein, 10 aa, Artificial Sequence
  Description of Artificial Sequence: Synthetic epitope
NEGESKKEQE

SEQ ID NO: 29648 - protein, 10 aa, Artificial Sequence
  Description of Artificial Sequence: Synthetic epitope
NEGFLSRISG

SEQ ID NO: 29649 - protein, 10 aa, Artificial Sequence
  Description of Artificial Sequence: Synthetic epitope
NEGIQAQTVA

SEQ ID NO: 29650 - protein, 10 aa, Artificial Sequence
  Description of Artificial Sequence: Synthetic epitope
NEGIVWYRHS

SEQ ID NO: 29651 - protein, 10 aa, Artificial Sequence
  Description of Artificial Sequence: Synthetic epitope
NEGLASSRKE

SEQ ID NO: 29652 - protein, 10 aa, Artificial Sequence
  Description of Artificial Sequence: Synthetic epitope
NEGPSSAEGK

SEQ ID NO: 29653 - protein, 10 aa, Artificial Sequence
  Description of Artificial Sequence: Synthetic epitope
NEHDHSKSKE

SEQ ID NO: 29654 - protein, 10 aa, Artificial Sequence
  Description of Artificial Sequence: Synthetic epitope
NEHDNFTKNL

SEQ ID NO: 29655 - protein, 10 aa, Artificial Sequence
  Description of Artificial Sequence: Synthetic epitope
NEHGIKSDSS

SEQ ID NO: 29656 - protein, 10 aa, Artificial Sequence
  Description of Artificial Sequence: Synthetic epitope
NEIDKTLESM

SEQ ID NO: 29657 - protein, 10 aa, Artificial Sequence
  Description of Artificial Sequence: Synthetic epitope
NEIDWLHVKN

SEQ ID NO: 29658 - protein, 10 aa, Artificial Sequence
  Description of Artificial Sequence: Synthetic epitope
NEIEEGKNKE

SEQ ID NO: 29659 - protein, 10 aa, Artificial Sequence
  Description of Artificial Sequence: Synthetic epitope
NEIETIESSL

SEQ ID NO: 29660 - protein, 10 aa, Artificial Sequence
  Description of Artificial Sequence: Synthetic epitope
NEIGLELQMG

SEQ ID NO: 29661 - protein, 10 aa, Artificial Sequence
  Description of Artificial Sequence: Synthetic epitope
NEIMHSSEMK

SEQ ID NO: 29662 - protein, 10 aa, Artificial Sequence
  Description of Artificial Sequence: Synthetic epitope
NEIMVKMPYQ

SEQ ID NO: 29663 - protein, 10 aa, Artificial Sequence
  Description of Artificial Sequence: Synthetic epitope
NEINMSAIKN

SEQ ID NO: 29664 - protein, 10 aa, Artificial Sequence
  Description of Artificial Sequence: Synthetic epitope
NEISEETTIQ

SEQ ID NO: 29665 - protein, 10 aa, Artificial Sequence
  Description of Artificial Sequence: Synthetic epitope
NEISHIGSRG

SEQ ID NO: 29666 - protein, 10 aa, Artificial Sequence
  Description of Artificial Sequence: Synthetic epitope
NEISLSTAHE

SEQ ID NO: 29667 - protein, 10 aa, Artificial Sequence
  Description of Artificial Sequence: Synthetic epitope
NEISQLESDD

SEQ ID NO: 29668 - protein, 10 aa, Artificial Sequence
  Description of Artificial Sequence: Synthetic epitope
NEITKKVQVP

SEQ ID NO: 29669 - protein, 10 aa, Artificial Sequence
  Description of Artificial Sequence: Synthetic epitope
NEITSNSRYE

SEQ ID NO: 29670 - protein, 10 aa, Artificial Sequence
  Description of Artificial Sequence: Synthetic epitope
NEIYTKTDSK

SEQ ID NO: 29671 - protein, 10 aa, Artificial Sequence
  Description of Artificial Sequence: Synthetic epitope
NEKAGKAKTK

SEQ ID NO: 29672 - protein, 10 aa, Artificial Sequence
  Description of Artificial Sequence: Synthetic epitope
NEKASSQQEI

SEQ ID NO: 29673 - protein, 10 aa, Artificial Sequence
  Description of Artificial Sequence: Synthetic epitope
NEKATDDYHY

SEQ ID NO: 29674 - protein, 10 aa, Artificial Sequence
  Description of Artificial Sequence: Synthetic epitope
NEKDLEVIQQ

SEQ ID NO: 29675 - protein, 10 aa, Artificial Sequence
  Description of Artificial Sequence: Synthetic epitope
NEKELQDEQE

SEQ ID NO: 29676 - protein, 10 aa, Artificial Sequence
  Description of Artificial Sequence: Synthetic epitope
NEKEQEMTSP

SEQ ID NO: 29677 - protein, 10 aa, Artificial Sequence
  Description of Artificial Sequence: Synthetic epitope
NEKINAEKSS

SEQ ID NO: 29678 - protein, 10 aa, Artificial Sequence
  Description of Artificial Sequence: Synthetic epitope
NEKIQQRTRI

SEQ ID NO: 29679 - protein, 10 aa, Artificial Sequence
  Description of Artificial Sequence: Synthetic epitope
NEKKNQKGQE

SEQ ID NO: 29680 - protein, 10 aa, Artificial Sequence
  Description of Artificial Sequence: Synthetic epitope
NEKLEKSKMQ

SEQ ID NO: 29681 - protein, 10 aa, Artificial Sequence
  Description of Artificial Sequence: Synthetic epitope
NEKLSRNETQ

SEQ ID NO: 29682 - protein, 10 aa, Artificial Sequence
  Description of Artificial Sequence: Synthetic epitope
NEKMGTAENQ

SEQ ID NO: 29683 - protein, 10 aa, Artificial Sequence
  Description of Artificial Sequence: Synthetic epitope
NEKNKKDKPW

SEQ ID NO: 29684 - protein, 10 aa, Artificial Sequence
  Description of Artificial Sequence: Synthetic epitope
NEKRQHETQK

SEQ ID NO: 29685 - protein, 10 aa, Artificial Sequence
  Description of Artificial Sequence: Synthetic epitope
NEKRVAVEAP

SEQ ID NO: 29686 - protein, 10 aa, Artificial Sequence
  Description of Artificial Sequence: Synthetic epitope
NEKSKELTTE

SEQ ID NO: 29687 - protein, 10 aa, Artificial Sequence
  Description of Artificial Sequence: Synthetic epitope
NEKSVKLSSQ

SEQ ID NO: 29688 - protein, 10 aa, Artificial Sequence
  Description of Artificial Sequence: Synthetic epitope
NEKTTENNEQ

SEQ ID NO: 29689 - protein, 10 aa, Artificial Sequence
  Description of Artificial Sequence: Synthetic epitope
NEKVVNQEQS

SEQ ID NO: 29690 - protein, 10 aa, Artificial Sequence
  Description of Artificial Sequence: Synthetic epitope
NELAGTVPST

SEQ ID NO: 29691 - protein, 10 aa, Artificial Sequence
  Description of Artificial Sequence: Synthetic epitope
NELAVLANIE

SEQ ID NO: 29692 - protein, 10 aa, Artificial Sequence
  Description of Artificial Sequence: Synthetic epitope
NELEEAQQVE

SEQ ID NO: 29693 - protein, 10 aa, Artificial Sequence
  Description of Artificial Sequence: Synthetic epitope
NELFIQTKGF

SEQ ID NO: 29694 - protein, 10 aa, Artificial Sequence
  Description of Artificial Sequence: Synthetic epitope
NELGLFLKFQ

SEQ ID NO: 29695 - protein, 10 aa, Artificial Sequence
  Description of Artificial Sequence: Synthetic epitope
NELIKTADGG

SEQ ID NO: 29696 - protein, 10 aa, Artificial Sequence
  Description of Artificial Sequence: Synthetic epitope
NELISLGEYE

SEQ ID NO: 29697 - protein, 10 aa, Artificial Sequence
  Description of Artificial Sequence: Synthetic epitope
NELKESQLEI

SEQ ID NO: 29698 - protein, 10 aa, Artificial Sequence
  Description of Artificial Sequence: Synthetic epitope
NELKSEAIIE

SEQ ID NO: 29699 - protein, 10 aa, Artificial Sequence
  Description of Artificial Sequence: Synthetic epitope
NELKSEKQEN

SEQ ID NO: 29700 - protein, 10 aa, Artificial Sequence
  Description of Artificial Sequence: Synthetic epitope
NELKSLNIST

SEQ ID NO: 29701 - protein, 10 aa, Artificial Sequence
  Description of Artificial Sequence: Synthetic epitope
NELKTQAFEA

SEQ ID NO: 29702 - protein, 10 aa, Artificial Sequence
  Description of Artificial Sequence: Synthetic epitope
NELLPSAAEN

SEQ ID NO: 29703 - protein, 10 aa, Artificial Sequence
  Description of Artificial Sequence: Synthetic epitope
NELLVFLQGK

SEQ ID NO: 29704 - protein, 10 aa, Artificial Sequence
  Description of Artificial Sequence: Synthetic epitope
NELMESEGKT

SEQ ID NO: 29705 - protein, 10 aa, Artificial Sequence
  Description of Artificial Sequence: Synthetic epitope
NELQETLPQK

SEQ ID NO: 29706 - protein, 10 aa, Artificial Sequence
  Description of Artificial Sequence: Synthetic epitope
NELQNEVSEL

SEQ ID NO: 29707 - protein, 10 aa, Artificial Sequence
  Description of Artificial Sequence: Synthetic epitope
NELTGIKESD

SEQ ID NO: 29708 - protein, 10 aa, Artificial Sequence
  Description of Artificial Sequence: Synthetic epitope
NEMALIRVVQ

SEQ ID NO: 29709 - protein, 10 aa, Artificial Sequence
  Description of Artificial Sequence: Synthetic epitope
NEMEAPTTAY

SEQ ID NO: 29710 - protein, 10 aa, Artificial Sequence
  Description of Artificial Sequence: Synthetic epitope
NEMEEHELKD

SEQ ID NO: 29711 - protein, 10 aa, Artificial Sequence
  Description of Artificial Sequence: Synthetic epitope
NEMESAVKLS

SEQ ID NO: 29712 - protein, 10 aa, Artificial Sequence
  Description of Artificial Sequence: Synthetic epitope
NEMISKGAVE

SEQ ID NO: 29713 - protein, 10 aa, Artificial Sequence
  Description of Artificial Sequence: Synthetic epitope
NEMKEAGNLE

SEQ ID NO: 29714 - protein, 10 aa, Artificial Sequence
  Description of Artificial Sequence: Synthetic epitope
NEMLSKKALA

SEQ ID NO: 29715 - protein, 10 aa, Artificial Sequence
  Description of Artificial Sequence: Synthetic epitope
NEMMASQALR

SEQ ID NO: 29716 - protein, 10 aa, Artificial Sequence
  Description of Artificial Sequence: Synthetic epitope
NEMQKLQAEA

SEQ ID NO: 29717 - protein, 10 aa, Artificial Sequence
  Description of Artificial Sequence: Synthetic epitope
NEMRTVKRVV

SEQ ID NO: 29718 - protein, 10 aa, Artificial Sequence
  Description of Artificial Sequence: Synthetic epitope
NEMWNQFNKV

SEQ ID NO: 29719 - protein, 10 aa, Artificial Sequence
  Description of Artificial Sequence: Synthetic epitope
NENDQQIREG

SEQ ID NO: 29720 - protein, 10 aa, Artificial Sequence
  Description of Artificial Sequence: Synthetic epitope
NENDVILMRS

SEQ ID NO: 29721 - protein, 10 aa, Artificial Sequence
  Description of Artificial Sequence: Synthetic epitope
NENEKSDASI

SEQ ID NO: 29722 - protein, 10 aa, Artificial Sequence
  Description of Artificial Sequence: Synthetic epitope
NENESTSESA

SEQ ID NO: 29723 - protein, 10 aa, Artificial Sequence
  Description of Artificial Sequence: Synthetic epitope
NENIKLDELA

SEQ ID NO: 29724 - protein, 10 aa, Artificial Sequence
  Description of Artificial Sequence: Synthetic epitope
NENKALTSKK

SEQ ID NO: 29725 - protein, 10 aa, Artificial Sequence
  Description of Artificial Sequence: Synthetic epitope
NENKGASELV

SEQ ID NO: 29726 - protein, 10 aa, Artificial Sequence
  Description of Artificial Sequence: Synthetic epitope
NENKGTALLT

SEQ ID NO: 29727 - protein, 10 aa, Artificial Sequence
  Description of Artificial Sequence: Synthetic epitope
NENKSANPGS

SEQ ID NO: 29728 - protein, 10 aa, Artificial Sequence
  Description of Artificial Sequence: Synthetic epitope
NENKVSLPKS

SEQ ID NO: 29729 - protein, 10 aa, Artificial Sequence
  Description of Artificial Sequence: Synthetic epitope
NENMEQNEQK

SEQ ID NO: 29730 - protein, 10 aa, Artificial Sequence
  Description of Artificial Sequence: Synthetic epitope
NENMGAVDSA

SEQ ID NO: 29731 - protein, 10 aa, Artificial Sequence
  Description of Artificial Sequence: Synthetic epitope
NENRKQQFVQ

SEQ ID NO: 29732 - protein, 10 aa, Artificial Sequence
  Description of Artificial Sequence: Synthetic epitope
NENVDDRLNN

SEQ ID NO: 29733 - protein, 10 aa, Artificial Sequence
  Description of Artificial Sequence: Synthetic epitope
NEPDEAHLIQ

SEQ ID NO: 29734 - protein, 10 aa, Artificial Sequence
  Description of Artificial Sequence: Synthetic epitope
NEPLSSKSQR

SEQ ID NO: 29735 - protein, 10 aa, Artificial Sequence
  Description of Artificial Sequence: Synthetic epitope
NEPQMDSNYA

SEQ ID NO: 29736 - protein, 10 aa, Artificial Sequence
  Description of Artificial Sequence: Synthetic epitope
NEPVSLEARL

SEQ ID NO: 29737 - protein, 10 aa, Artificial Sequence
  Description of Artificial Sequence: Synthetic epitope
NEQFVDTRQS

SEQ ID NO: 29738 - protein, 10 aa, Artificial Sequence
  Description of Artificial Sequence: Synthetic epitope
NEQHRTVKEL

SEQ ID NO: 29739 - protein, 10 aa, Artificial Sequence
  Description of Artificial Sequence: Synthetic epitope
NEQKLHKIAN

SEQ ID NO: 29740 - protein, 10 aa, Artificial Sequence
  Description of Artificial Sequence: Synthetic epitope
NEQLELGNER

SEQ ID NO: 29741 - protein, 10 aa, Artificial Sequence
  Description of Artificial Sequence: Synthetic epitope
NEQMFAILDN

SEQ ID NO: 29742 - protein, 10 aa, Artificial Sequence
  Description of Artificial Sequence: Synthetic epitope
NEQNDESLSK

SEQ ID NO: 29743 - protein, 10 aa, Artificial Sequence
  Description of Artificial Sequence: Synthetic epitope
NEQQAAQRTA

SEQ ID NO: 29744 - protein, 10 aa, Artificial Sequence
  Description of Artificial Sequence: Synthetic epitope
NEQQIISDPR

SEQ ID NO: 29745 - protein, 10 aa, Artificial Sequence
  Description of Artificial Sequence: Synthetic epitope
NEQTASFAPA

SEQ ID NO: 29746 - protein, 10 aa, Artificial Sequence
  Description of Artificial Sequence: Synthetic epitope
NEQVKGYGTH

SEQ ID NO: 29747 - protein, 10 aa, Artificial Sequence
  Description of Artificial Sequence: Synthetic epitope
NERAAKELEQ

SEQ ID NO: 29748 - protein, 10 aa, Artificial Sequence
  Description of Artificial Sequence: Synthetic epitope
NERAVQTLAG

SEQ ID NO: 29749 - protein, 10 aa, Artificial Sequence
  Description of Artificial Sequence: Synthetic epitope
NERENVEYIE

SEQ ID NO: 29750 - protein, 10 aa, Artificial Sequence
  Description of Artificial Sequence: Synthetic epitope
NERHQILRPG

SEQ ID NO: 29751 - protein, 10 aa, Artificial Sequence
  Description of Artificial Sequence: Synthetic epitope
NERHRYDDVE

SEQ ID NO: 29752 - protein, 10 aa, Artificial Sequence
  Description of Artificial Sequence: Synthetic epitope
NERKNLQTAR

SEQ ID NO: 29753 - protein, 10 aa, Artificial Sequence
  Description of Artificial Sequence: Synthetic epitope
NERKSTHSNK

SEQ ID NO: 29754 - protein, 10 aa, Artificial Sequence
  Description of Artificial Sequence: Synthetic epitope
NERNNVNESW

SEQ ID NO: 29755 - protein, 10 aa, Artificial Sequence
  Description of Artificial Sequence: Synthetic epitope
NERRTVSRRK

SEQ ID NO: 29756 - protein, 10 aa, Artificial Sequence
  Description of Artificial Sequence: Synthetic epitope
NERSDDTVSN

SEQ ID NO: 29757 - protein, 10 aa, Artificial Sequence
  Description of Artificial Sequence: Synthetic epitope
NESAAKMIKE

SEQ ID NO: 29758 - protein, 10 aa, Artificial Sequence
  Description of Artificial Sequence: Synthetic epitope
NESANSTAQY

SEQ ID NO: 29759 - protein, 10 aa, Artificial Sequence
  Description of Artificial Sequence: Synthetic epitope
NESEAMVQEV

SEQ ID NO: 29760 - protein, 10 aa, Artificial Sequence
  Description of Artificial Sequence: Synthetic epitope
NESEESVKST

SEQ ID NO: 29761 - protein, 10 aa, Artificial Sequence
  Description of Artificial Sequence: Synthetic epitope
NESELAEVFA

SEQ ID NO: 29762 - protein, 10 aa, Artificial Sequence
  Description of Artificial Sequence: Synthetic epitope
NESFNNQSRR

SEQ ID NO: 29763 - protein, 10 aa, Artificial Sequence
  Description of Artificial Sequence: Synthetic epitope
NESITTKINK

SEQ ID NO: 29764 - protein, 10 aa, Artificial Sequence
  Description of Artificial Sequence: Synthetic epitope
NESKDEQWKR

SEQ ID NO: 29765 - protein, 10 aa, Artificial Sequence
  Description of Artificial Sequence: Synthetic epitope
NESLLILRAI

SEQ ID NO: 29766 - protein, 10 aa, Artificial Sequence
  Description of Artificial Sequence: Synthetic epitope
NESLRPIHRE

SEQ ID NO: 29767 - protein, 10 aa, Artificial Sequence
  Description of Artificial Sequence: Synthetic epitope
NESLVSDTET

SEQ ID NO: 29768 - protein, 10 aa, Artificial Sequence
  Description of Artificial Sequence: Synthetic epitope
NESNTQKTYI

SEQ ID NO: 29769 - protein, 10 aa, Artificial Sequence
  Description of Artificial Sequence: Synthetic epitope
NESQSRQNSS

SEQ ID NO: 29770 - protein, 10 aa, Artificial Sequence
  Description of Artificial Sequence: Synthetic epitope
NESRLQKIVS

SEQ ID NO: 29771 - protein, 10 aa, Artificial Sequence
  Description of Artificial Sequence: Synthetic epitope
NESSLNEKTL

SEQ ID NO: 29772 - protein, 10 aa, Artificial Sequence
  Description of Artificial Sequence: Synthetic epitope
NESSRMEITR

SEQ ID NO: 29773 - protein, 10 aa, Artificial Sequence
  Description of Artificial Sequence: Synthetic epitope
NESSVSSFTE

SEQ ID NO: 29774 - protein, 10 aa, Artificial Sequence
  Description of Artificial Sequence: Synthetic epitope
NESTTKESSE

SEQ ID NO: 29775 - protein, 10 aa, Artificial Sequence
  Description of Artificial Sequence: Synthetic epitope
NESTVPESVT

SEQ ID NO: 29776 - protein, 10 aa, Artificial Sequence
  Description of Artificial Sequence: Synthetic epitope
NESVALVSAA

SEQ ID NO: 29777 - protein, 10 aa, Artificial Sequence
  Description of Artificial Sequence: Synthetic epitope
NESVKIAFAV

SEQ ID NO: 29778 - protein, 10 aa, Artificial Sequence
  Description of Artificial Sequence: Synthetic epitope
NESVLETLTD

SEQ ID NO: 29779 - protein, 10 aa, Artificial Sequence
  Description of Artificial Sequence: Synthetic epitope
NESVVSIAAQ

SEQ ID NO: 29780 - protein, 10 aa, Artificial Sequence
  Description of Artificial Sequence: Synthetic epitope
NESYKHEQVY

SEQ ID NO: 29781 - protein, 10 aa, Artificial Sequence
  Description of Artificial Sequence: Synthetic epitope
NETEEIKDER

SEQ ID NO: 29782 - protein, 10 aa, Artificial Sequence
  Description of Artificial Sequence: Synthetic epitope
NETEFSLNVT

SEQ ID NO: 29783 - protein, 10 aa, Artificial Sequence
  Description of Artificial Sequence: Synthetic epitope
NETGISHDAI

SEQ ID NO: 29784 - protein, 10 aa, Artificial Sequence
  Description of Artificial Sequence: Synthetic epitope
NETKEKAQEE

SEQ ID NO: 29785 - protein, 10 aa, Artificial Sequence
  Description of Artificial Sequence: Synthetic epitope
NETKIQWHGK

SEQ ID NO: 29786 - protein, 10 aa, Artificial Sequence
  Description of Artificial Sequence: Synthetic epitope
NETKNSTRRQ

SEQ ID NO: 29787 - protein, 10 aa, Artificial Sequence
  Description of Artificial Sequence: Synthetic epitope
NETKSNSQQD

SEQ ID NO: 29788 - protein, 10 aa, Artificial Sequence
  Description of Artificial Sequence: Synthetic epitope
NETKSNSQQD

SEQ ID NO: 29789 - protein, 10 aa, Artificial Sequence
  Description of Artificial Sequence: Synthetic epitope
NETKVINSLS

SEQ ID NO: 29790 - protein, 10 aa, Artificial Sequence
  Description of Artificial Sequence: Synthetic epitope
NETKVRKELI

SEQ ID NO: 29791 - protein, 10 aa, Artificial Sequence
  Description of Artificial Sequence: Synthetic epitope
NETNKRVEQE

SEQ ID NO: 29792 - protein, 10 aa, Artificial Sequence
  Description of Artificial Sequence: Synthetic epitope
NETQDDRSEQ

SEQ ID NO: 29793 - protein, 10 aa, Artificial Sequence
  Description of Artificial Sequence: Synthetic epitope
NETQSESTEQ

SEQ ID NO: 29794 - protein, 10 aa, Artificial Sequence
  Description of Artificial Sequence: Synthetic epitope
NETQYLPFIR

SEQ ID NO: 29795 - protein, 10 aa, Artificial Sequence
  Description of Artificial Sequence: Synthetic epitope
NETRQTPEYQ

SEQ ID NO: 29796 - protein, 10 aa, Artificial Sequence
  Description of Artificial Sequence: Synthetic epitope
NETSAHRQKT

SEQ ID NO: 29797 - protein, 10 aa, Artificial Sequence
  Description of Artificial Sequence: Synthetic epitope
NETSEIRFEI

SEQ ID NO: 29798 - protein, 10 aa, Artificial Sequence
  Description of Artificial Sequence: Synthetic epitope
NETSKSANQD

SEQ ID NO: 29799 - protein, 10 aa, Artificial Sequence
  Description of Artificial Sequence: Synthetic epitope
NETSQMSQPE

SEQ ID NO: 29800 - protein, 10 aa, Artificial Sequence
  Description of Artificial Sequence: Synthetic epitope
NETSQSQLNR

SEQ ID NO: 29801 - protein, 10 aa, Artificial Sequence
  Description of Artificial Sequence: Synthetic epitope
NETTADSNET

SEQ ID NO: 29802 - protein, 10 aa, Artificial Sequence
  Description of Artificial Sequence: Synthetic epitope
NEVAARAQAS

SEQ ID NO: 29803 - protein, 10 aa, Artificial Sequence
  Description of Artificial Sequence: Synthetic epitope
NEVDDTSKQT

SEQ ID NO: 29804 - protein, 10 aa, Artificial Sequence
  Description of Artificial Sequence: Synthetic epitope
NEVEKTMEYS

SEQ ID NO: 29805 - protein, 10 aa, Artificial Sequence
  Description of Artificial Sequence: Synthetic epitope
NEVIFKKYVM

SEQ ID NO: 29806 - protein, 10 aa, Artificial Sequence
  Description of Artificial Sequence: Synthetic epitope
NEVIRHDATW

SEQ ID NO: 29807 - protein, 10 aa, Artificial Sequence
  Description of Artificial Sequence: Synthetic epitope
NEVLESQINE

SEQ ID NO: 29808 - protein, 10 aa, Artificial Sequence
  Description of Artificial Sequence: Synthetic epitope
NEVNSHSNAQ

SEQ ID NO: 29809 - protein, 10 aa, Artificial Sequence
  Description of Artificial Sequence: Synthetic epitope
NEVQDYVSVE

SEQ ID NO: 29810 - protein, 10 aa, Artificial Sequence
  Description of Artificial Sequence: Synthetic epitope
NEVQNIKFNS

SEQ ID NO: 29811 - protein, 10 aa, Artificial Sequence
  Description of Artificial Sequence: Synthetic epitope
NEVSRAREAV

SEQ ID NO: 29812 - protein, 10 aa, Artificial Sequence
  Description of Artificial Sequence: Synthetic epitope
NEVSVHEQEY

SEQ ID NO: 29813 - protein, 10 aa, Artificial Sequence
  Description of Artificial Sequence: Synthetic epitope
NEVTRALERR

SEQ ID NO: 29814 - protein, 10 aa, Artificial Sequence
  Description of Artificial Sequence: Synthetic epitope
NEVTVETDKK

SEQ ID NO: 29815 - protein, 10 aa, Artificial Sequence
  Description of Artificial Sequence: Synthetic epitope
NEVVEVPEIK

SEQ ID NO: 29816 - protein, 10 aa, Artificial Sequence
  Description of Artificial Sequence: Synthetic epitope
NEVVQSSEKE

SEQ ID NO: 29817 - protein, 10 aa, Artificial Sequence
  Description of Artificial Sequence: Synthetic epitope
NEWEKVFGYD

SEQ ID NO: 29818 - protein, 10 aa, Artificial Sequence
  Description of Artificial Sequence: Synthetic epitope
NEWKFADILS

SEQ ID NO: 29819 - protein, 10 aa, Artificial Sequence
  Description of Artificial Sequence: Synthetic epitope
NEWKSNVDEI

SEQ ID NO: 29820 - protein, 10 aa, Artificial Sequence
  Description of Artificial Sequence: Synthetic epitope
NEWNEIQTVR

SEQ ID NO: 29821 - protein, 10 aa, Artificial Sequence
  Description of Artificial Sequence: Synthetic epitope
NEWQNTGFQY

SEQ ID NO: 29822 - protein, 10 aa, Artificial Sequence
  Description of Artificial Sequence: Synthetic epitope
NEWSYQSETS

SEQ ID NO: 29823 - protein, 10 aa, Artificial Sequence
  Description of Artificial Sequence: Synthetic epitope
NEYILKQVAT

SEQ ID NO: 29824 - protein, 10 aa, Artificial Sequence
  Description of Artificial Sequence: Synthetic epitope
NEYPALKNSK

SEQ ID NO: 29825 - protein, 10 aa, Artificial Sequence
  Description of Artificial Sequence: Synthetic epitope
NEYQSGFKSI

SEQ ID NO: 29826 - protein, 10 aa, Artificial Sequence
  Description of Artificial Sequence: Synthetic epitope
NEYVGKAATR

SEQ ID NO: 29827 - protein, 10 aa, Artificial Sequence
  Description of Artificial Sequence: Synthetic epitope
NFAEIEEANR

SEQ ID NO: 29828 - protein, 10 aa, Artificial Sequence
  Description of Artificial Sequence: Synthetic epitope
NFAKWRTATT

SEQ ID NO: 29829 - protein, 10 aa, Artificial Sequence
  Description of Artificial Sequence: Synthetic epitope
NFALQLSSEE

SEQ ID NO: 29830 - protein, 10 aa, Artificial Sequence
  Description of Artificial Sequence: Synthetic epitope
NFAQSRQKRP

SEQ ID NO: 29831 - protein, 10 aa, Artificial Sequence
  Description of Artificial Sequence: Synthetic epitope
NFARQYILAK

SEQ ID NO: 29832 - protein, 10 aa, Artificial Sequence
  Description of Artificial Sequence: Synthetic epitope
NFDATESKYD

SEQ ID NO: 29833 - protein, 10 aa, Artificial Sequence
  Description of Artificial Sequence: Synthetic epitope
NFDTELSTKE

SEQ ID NO: 29834 - protein, 10 aa, Artificial Sequence
  Description of Artificial Sequence: Synthetic epitope
NFDVMELPEQ

SEQ ID NO: 29835 - protein, 10 aa, Artificial Sequence
  Description of Artificial Sequence: Synthetic epitope
NFDYKRFIKF

SEQ ID NO: 29836 - protein, 10 aa, Artificial Sequence
  Description of Artificial Sequence: Synthetic epitope
NFEIVSKNKK

SEQ ID NO: 29837 - protein, 10 aa, Artificial Sequence
  Description of Artificial Sequence: Synthetic epitope
NFEKSITKLG

SEQ ID NO: 29838 - protein, 10 aa, Artificial Sequence
  Description of Artificial Sequence: Synthetic epitope
NFEMSVVQLA

SEQ ID NO: 29839 - protein, 10 aa, Artificial Sequence
  Description of Artificial Sequence: Synthetic epitope
NFGDAARQTP

SEQ ID NO: 29840 - protein, 10 aa, Artificial Sequence
  Description of Artificial Sequence: Synthetic epitope
NFGKMESGKE

SEQ ID NO: 29841 - protein, 10 aa, Artificial Sequence
  Description of Artificial Sequence: Synthetic epitope
NFGQSVLLSS

SEQ ID NO: 29842 - protein, 10 aa, Artificial Sequence
  Description of Artificial Sequence: Synthetic epitope
NFGVQNITAA

SEQ ID NO: 29843 - protein, 10 aa, Artificial Sequence
  Description of Artificial Sequence: Synthetic epitope
NFHEVKEVAG

SEQ ID NO: 29844 - protein, 10 aa, Artificial Sequence
  Description of Artificial Sequence: Synthetic epitope
NFIQKNSMDK

SEQ ID NO: 29845 - protein, 10 aa, Artificial Sequence
  Description of Artificial Sequence: Synthetic epitope
NFIRNLLSET

SEQ ID NO: 29846 - protein, 10 aa, Artificial Sequence
  Description of Artificial Sequence: Synthetic epitope
NFKKNSISSK

SEQ ID NO: 29847 - protein, 10 aa, Artificial Sequence
  Description of Artificial Sequence: Synthetic epitope
NFKLKLIKRN

SEQ ID NO: 29848 - protein, 10 aa, Artificial Sequence
  Description of Artificial Sequence: Synthetic epitope
NFKVRIRSAA

SEQ ID NO: 29849 - protein, 10 aa, Artificial Sequence
  Description of Artificial Sequence: Synthetic epitope
NFLAIQAGNF

SEQ ID NO: 29850 - protein, 10 aa, Artificial Sequence
  Description of Artificial Sequence: Synthetic epitope
NFLAKLLNDQ

SEQ ID NO: 29851 - protein, 10 aa, Artificial Sequence
  Description of Artificial Sequence: Synthetic epitope
NFLAMLIKLA

SEQ ID NO: 29852 - protein, 10 aa, Artificial Sequence
  Description of Artificial Sequence: Synthetic epitope
NFLLTTEIIP

SEQ ID NO: 29853 - protein, 10 aa, Artificial Sequence
  Description of Artificial Sequence: Synthetic epitope
NFLSKTVQAE

SEQ ID NO: 29854 - protein, 10 aa, Artificial Sequence
  Description of Artificial Sequence: Synthetic epitope
NFLSLALPKG

SEQ ID NO: 29855 - protein, 10 aa, Artificial Sequence
  Description of Artificial Sequence: Synthetic epitope
NFLTSTVIPE

SEQ ID NO: 29856 - protein, 10 aa, Artificial Sequence
  Description of Artificial Sequence: Synthetic epitope
NFLVSQLIRA

SEQ ID NO: 29857 - protein, 10 aa, Artificial Sequence
  Description of Artificial Sequence: Synthetic epitope
NFMAQSVSEL

SEQ ID NO: 29858 - protein, 10 aa, Artificial Sequence
  Description of Artificial Sequence: Synthetic epitope
NFMKKMKNHE

SEQ ID NO: 29859 - protein, 10 aa, Artificial Sequence
  Description of Artificial Sequence: Synthetic epitope
NFMSVAKTIL

SEQ ID NO: 29860 - protein, 10 aa, Artificial Sequence
  Description of Artificial Sequence: Synthetic epitope
NFMYSKTVKR

SEQ ID NO: 29861 - protein, 10 aa, Artificial Sequence
  Description of Artificial Sequence: Synthetic epitope
NFNAMTYGAT

SEQ ID NO: 29862 - protein, 10 aa, Artificial Sequence
  Description of Artificial Sequence: Synthetic epitope
NFNISPMLFR

SEQ ID NO: 29863 - protein, 10 aa, Artificial Sequence
  Description of Artificial Sequence: Synthetic epitope
NFNVENSQEL

SEQ ID NO: 29864 - protein, 10 aa, Artificial Sequence
  Description of Artificial Sequence: Synthetic epitope
NFPVVWHKTV

SEQ ID NO: 29865 - protein, 10 aa, Artificial Sequence
  Description of Artificial Sequence: Synthetic epitope
NFQKNPILKQ

SEQ ID NO: 29866 - protein, 10 aa, Artificial Sequence
  Description of Artificial Sequence: Synthetic epitope
NFQMASITSP

SEQ ID NO: 29867 - protein, 10 aa, Artificial Sequence
  Description of Artificial Sequence: Synthetic epitope
NFQSSTVYAH

SEQ ID NO: 29868 - protein, 10 aa, Artificial Sequence
  Description of Artificial Sequence: Synthetic epitope
NFRFSSLAKD

SEQ ID NO: 29869 - protein, 10 aa, Artificial Sequence
  Description of Artificial Sequence: Synthetic epitope
NFRSVEVSRT

SEQ ID NO: 29870 - protein, 10 aa, Artificial Sequence
  Description of Artificial Sequence: Synthetic epitope
NFSALAKEES

SEQ ID NO: 29871 - protein, 10 aa, Artificial Sequence
  Description of Artificial Sequence: Synthetic epitope
NFSALANTVT

SEQ ID NO: 29872 - protein, 10 aa, Artificial Sequence
  Description of Artificial Sequence: Synthetic epitope
NFSAMASELE

SEQ ID NO: 29873 - protein, 10 aa, Artificial Sequence
  Description of Artificial Sequence: Synthetic epitope
NFSAQPRSSQ

SEQ ID NO: 29874 - protein, 10 aa, Artificial Sequence
  Description of Artificial Sequence: Synthetic epitope
NFSATANQWE

SEQ ID NO: 29875 - protein, 10 aa, Artificial Sequence
  Description of Artificial Sequence: Synthetic epitope
NFSIKEAKSA

SEQ ID NO: 29876 - protein, 10 aa, Artificial Sequence
  Description of Artificial Sequence: Synthetic epitope
NFSLDLLKTA

SEQ ID NO: 29877 - protein, 10 aa, Artificial Sequence
  Description of Artificial Sequence: Synthetic epitope
NFSLQQLQNK

SEQ ID NO: 29878 - protein, 10 aa, Artificial Sequence
  Description of Artificial Sequence: Synthetic epitope
NFSQAMASPA

SEQ ID NO: 29879 - protein, 10 aa, Artificial Sequence
  Description of Artificial Sequence: Synthetic epitope
NFSVYLLQPT

SEQ ID NO: 29880 - protein, 10 aa, Artificial Sequence
  Description of Artificial Sequence: Synthetic epitope
NFSYEGSMEH

SEQ ID NO: 29881 - protein, 10 aa, Artificial Sequence
  Description of Artificial Sequence: Synthetic epitope
NFTEMSQRLE

SEQ ID NO: 29882 - protein, 10 aa, Artificial Sequence
  Description of Artificial Sequence: Synthetic epitope
NFTNRKISVQ

SEQ ID NO: 29883 - protein, 10 aa, Artificial Sequence
  Description of Artificial Sequence: Synthetic epitope
NFTSNSSRVS

SEQ ID NO: 29884 - protein, 10 aa, Artificial Sequence
  Description of Artificial Sequence: Synthetic epitope
NFTVNLEAKG

SEQ ID NO: 29885 - protein, 10 aa, Artificial Sequence
  Description of Artificial Sequence: Synthetic epitope
NFVAFSRTDK

SEQ ID NO: 29886 - protein, 10 aa, Artificial Sequence
  Description of Artificial Sequence: Synthetic epitope
NFVGKVALML

SEQ ID NO: 29887 - protein, 10 aa, Artificial Sequence
  Description of Artificial Sequence: Synthetic epitope
NFVLESEKEK

SEQ ID NO: 29888 - protein, 10 aa, Artificial Sequence
  Description of Artificial Sequence: Synthetic epitope
NGADTAVNKQ

SEQ ID NO: 29889 - protein, 10 aa, Artificial Sequence
  Description of Artificial Sequence: Synthetic epitope
NGAKQHLPGS

SEQ ID NO: 29890 - protein, 10 aa, Artificial Sequence
  Description of Artificial Sequence: Synthetic epitope
NGALAKVEES

SEQ ID NO: 29891 - protein, 10 aa, Artificial Sequence
  Description of Artificial Sequence: Synthetic epitope
NGATVSASSV

SEQ ID NO: 29892 - protein, 10 aa, Artificial Sequence
  Description of Artificial Sequence: Synthetic epitope
NGDKQMKNSN

SEQ ID NO: 29893 - protein, 10 aa, Artificial Sequence
  Description of Artificial Sequence: Synthetic epitope
NGDLKSKLKQ

SEQ ID NO: 29894 - protein, 10 aa, Artificial Sequence
  Description of Artificial Sequence: Synthetic epitope
NGDQTQKLAE

SEQ ID NO: 29895 - protein, 10 aa, Artificial Sequence
  Description of Artificial Sequence: Synthetic epitope
NGDSSAEAEE

SEQ ID NO: 29896 - protein, 10 aa, Artificial Sequence
  Description of Artificial Sequence: Synthetic epitope
NGDTRVTEEA

SEQ ID NO: 29897 - protein, 10 aa, Artificial Sequence
  Description of Artificial Sequence: Synthetic epitope
NGDVSSKDTD

SEQ ID NO: 29898 - protein, 10 aa, Artificial Sequence
  Description of Artificial Sequence: Synthetic epitope
NGEAASTSSL

SEQ ID NO: 29899 - protein, 10 aa, Artificial Sequence
  Description of Artificial Sequence: Synthetic epitope
NGEDSTRQSQ

SEQ ID NO: 29900 - protein, 10 aa, Artificial Sequence
  Description of Artificial Sequence: Synthetic epitope
NGEHTSKATL

SEQ ID NO: 29901 - protein, 10 aa, Artificial Sequence
  Description of Artificial Sequence: Synthetic epitope
NGEINKIKNE

SEQ ID NO: 29902 - protein, 10 aa, Artificial Sequence
  Description of Artificial Sequence: Synthetic epitope
NGEKSKKPSK

SEQ ID NO: 29903 - protein, 10 aa, Artificial Sequence
  Description of Artificial Sequence: Synthetic epitope
NGELAATTVE

SEQ ID NO: 29904 - protein, 10 aa, Artificial Sequence
  Description of Artificial Sequence: Synthetic epitope
NGENHNFHTA

SEQ ID NO: 29905 - protein, 10 aa, Artificial Sequence
  Description of Artificial Sequence: Synthetic epitope
NGEQRRASEP

SEQ ID NO: 29906 - protein, 10 aa, Artificial Sequence
  Description of Artificial Sequence: Synthetic epitope
NGESRSTLTT

SEQ ID NO: 29907 - protein, 10 aa, Artificial Sequence
  Description of Artificial Sequence: Synthetic epitope
NGETESSTAG

SEQ ID NO: 29908 - protein, 10 aa, Artificial Sequence
  Description of Artificial Sequence: Synthetic epitope
NGFEGTIQRT

SEQ ID NO: 29909 - protein, 10 aa, Artificial Sequence
  Description of Artificial Sequence: Synthetic epitope
NGFIAVNLSS

SEQ ID NO: 29910 - protein, 10 aa, Artificial Sequence
  Description of Artificial Sequence: Synthetic epitope
NGFSLKESTP

SEQ ID NO: 29911 - protein, 10 aa, Artificial Sequence
  Description of Artificial Sequence: Synthetic epitope
NGGLAVKTNE

SEQ ID NO: 29912 - protein, 10 aa, Artificial Sequence
  Description of Artificial Sequence: Synthetic epitope
NGGLESASEE

SEQ ID NO: 29913 - protein, 10 aa, Artificial Sequence
  Description of Artificial Sequence: Synthetic epitope
NGGLQQKTSQ

SEQ ID NO: 29914 - protein, 10 aa, Artificial Sequence
  Description of Artificial Sequence: Synthetic epitope
NGGLSKAKSP

SEQ ID NO: 29915 - protein, 10 aa, Artificial Sequence
  Description of Artificial Sequence: Synthetic epitope
NGGQTRKLTA

SEQ ID NO: 29916 - protein, 10 aa, Artificial Sequence
  Description of Artificial Sequence: Synthetic epitope
NGGSNTLNFQ

SEQ ID NO: 29917 - protein, 10 aa, Artificial Sequence
  Description of Artificial Sequence: Synthetic epitope
NGGTSVTEKL

SEQ ID NO: 29918 - protein, 10 aa, Artificial Sequence
  Description of Artificial Sequence: Synthetic epitope
NGGVSVSKNS

SEQ ID NO: 29919 - protein, 10 aa, Artificial Sequence
  Description of Artificial Sequence: Synthetic epitope
NGHSMKQEMA

SEQ ID NO: 29920 - protein, 10 aa, Artificial Sequence
  Description of Artificial Sequence: Synthetic epitope
NGHSRDYDFT

SEQ ID NO: 29921 - protein, 10 aa, Artificial Sequence
  Description of Artificial Sequence: Synthetic epitope
NGIKELEYDY

SEQ ID NO: 29922 - protein, 10 aa, Artificial Sequence
  Description of Artificial Sequence: Synthetic epitope
NGILQQEQWM

SEQ ID NO: 29923 - protein, 10 aa, Artificial Sequence
  Description of Artificial Sequence: Synthetic epitope
NGIVKYRFEE

SEQ ID NO: 29924 - protein, 10 aa, Artificial Sequence
  Description of Artificial Sequence: Synthetic epitope
NGKDYMIRVK

SEQ ID NO: 29925 - protein, 10 aa, Artificial Sequence
  Description of Artificial Sequence: Synthetic epitope
NGKEAEISVP

SEQ ID NO: 29926 - protein, 10 aa, Artificial Sequence
  Description of Artificial Sequence: Synthetic epitope
NGKEQLKWMD

SEQ ID NO: 29927 - protein, 10 aa, Artificial Sequence
  Description of Artificial Sequence: Synthetic epitope
NGKKATYLRK

SEQ ID NO: 29928 - protein, 10 aa, Artificial Sequence
  Description of Artificial Sequence: Synthetic epitope
NGKKVKALEI

SEQ ID NO: 29929 - protein, 10 aa, Artificial Sequence
  Description of Artificial Sequence: Synthetic epitope
NGKLALSKKL

SEQ ID NO: 29930 - protein, 10 aa, Artificial Sequence
  Description of Artificial Sequence: Synthetic epitope
NGKLLSVERS

SEQ ID NO: 29931 - protein, 10 aa, Artificial Sequence
  Description of Artificial Sequence: Synthetic epitope
NGKMIMSFEM

SEQ ID NO: 29932 - protein, 10 aa, Artificial Sequence
  Description of Artificial Sequence: Synthetic epitope
NGKSVGVEMN

SEQ ID NO: 29933 - protein, 10 aa, Artificial Sequence
  Description of Artificial Sequence: Synthetic epitope
NGKSYPTKVR

SEQ ID NO: 29934 - protein, 10 aa, Artificial Sequence
  Description of Artificial Sequence: Synthetic epitope
NGKTMLNDLL

SEQ ID NO: 29935 - protein, 10 aa, Artificial Sequence
  Description of Artificial Sequence: Synthetic epitope
NGKVDARSDR

SEQ ID NO: 29936 - protein, 10 aa, Artificial Sequence
  Description of Artificial Sequence: Synthetic epitope
NGKYMISTSE

SEQ ID NO: 29937 - protein, 10 aa, Artificial Sequence
  Description of Artificial Sequence: Synthetic epitope
NGLKLSNAAH

SEQ ID NO: 29938 - protein, 10 aa, Artificial Sequence
  Description of Artificial Sequence: Synthetic epitope
NGLQAVVHSE

SEQ ID NO: 29939 - protein, 10 aa, Artificial Sequence
  Description of Artificial Sequence: Synthetic epitope
NGLSASKSQI

SEQ ID NO: 29940 - protein, 10 aa, Artificial Sequence
  Description of Artificial Sequence: Synthetic epitope
NGLSKVDFWH

SEQ ID NO: 29941 - protein, 10 aa, Artificial Sequence
  Description of Artificial Sequence: Synthetic epitope
NGLSVARVSG

SEQ ID NO: 29942 - protein, 10 aa, Artificial Sequence
  Description of Artificial Sequence: Synthetic epitope
NGMEVALQTE

SEQ ID NO: 29943 - protein, 10 aa, Artificial Sequence
  Description of Artificial Sequence: Synthetic epitope
NGMQVNRLSS

SEQ ID NO: 29944 - protein, 10 aa, Artificial Sequence
  Description of Artificial Sequence: Synthetic epitope
NGNKSDQAHP

SEQ ID NO: 29945 - protein, 10 aa, Artificial Sequence
  Description of Artificial Sequence: Synthetic epitope
NGNLEKISQE

SEQ ID NO: 29946 - protein, 10 aa, Artificial Sequence
  Description of Artificial Sequence: Synthetic epitope
NGNPIVSVNT

SEQ ID NO: 29947 - protein, 10 aa, Artificial Sequence
  Description of Artificial Sequence: Synthetic epitope
NGNSMLSNQD

SEQ ID NO: 29948 - protein, 10 aa, Artificial Sequence
  Description of Artificial Sequence: Synthetic epitope
NGNSVRSTSR

SEQ ID NO: 29949 - protein, 10 aa, Artificial Sequence
  Description of Artificial Sequence: Synthetic epitope
NGQLVVDNHE

SEQ ID NO: 29950 - protein, 10 aa, Artificial Sequence
  Description of Artificial Sequence: Synthetic epitope
NGQNESNDTE

SEQ ID NO: 29951 - protein, 10 aa, Artificial Sequence
  Description of Artificial Sequence: Synthetic epitope
NGQQKVSAPL

SEQ ID NO: 29952 - protein, 10 aa, Artificial Sequence
  Description of Artificial Sequence: Synthetic epitope
NGRVAKVKGH

SEQ ID NO: 29953 - protein, 10 aa, Artificial Sequence
  Description of Artificial Sequence: Synthetic epitope
NGSEGRRSRS

SEQ ID NO: 29954 - protein, 10 aa, Artificial Sequence
  Description of Artificial Sequence: Synthetic epitope
NGSEMASATL

SEQ ID NO: 29955 - protein, 10 aa, Artificial Sequence
  Description of Artificial Sequence: Synthetic epitope
NGSGKEASKK

SEQ ID NO: 29956 - protein, 10 aa, Artificial Sequence
  Description of Artificial Sequence: Synthetic epitope
NGSIQAKSIQ

SEQ ID NO: 29957 - protein, 10 aa, Artificial Sequence
  Description of Artificial Sequence: Synthetic epitope
NGSKAVARTA

SEQ ID NO: 29958 - protein, 10 aa, Artificial Sequence
  Description of Artificial Sequence: Synthetic epitope
NGSRIEINQT

SEQ ID NO: 29959 - protein, 10 aa, Artificial Sequence
  Description of Artificial Sequence: Synthetic epitope
NGSSKVKKFD

SEQ ID NO: 29960 - protein, 10 aa, Artificial Sequence
  Description of Artificial Sequence: Synthetic epitope
NGSTKTNHVH

SEQ ID NO: 29961 - protein, 10 aa, Artificial Sequence
  Description of Artificial Sequence: Synthetic epitope
NGSTYKKPSK

SEQ ID NO: 29962 - protein, 10 aa, Artificial Sequence
  Description of Artificial Sequence: Synthetic epitope
NGTATQTSTP

SEQ ID NO: 29963 - protein, 10 aa, Artificial Sequence
  Description of Artificial Sequence: Synthetic epitope
NGTATQTSTP

SEQ ID NO: 29964 - protein, 10 aa, Artificial Sequence
  Description of Artificial Sequence: Synthetic epitope
NGTIIRKAVA

SEQ ID NO: 29965 - protein, 10 aa, Artificial Sequence
  Description of Artificial Sequence: Synthetic epitope
NGTKVLSDSA

SEQ ID NO: 29966 - protein, 10 aa, Artificial Sequence
  Description of Artificial Sequence: Synthetic epitope
NGTLTSQPNN

SEQ ID NO: 29967 - protein, 10 aa, Artificial Sequence
  Description of Artificial Sequence: Synthetic epitope
NGTMILKRTE

SEQ ID NO: 29968 - protein, 10 aa, Artificial Sequence
  Description of Artificial Sequence: Synthetic epitope
NGTQAVARQD

SEQ ID NO: 29969 - protein, 10 aa, Artificial Sequence
  Description of Artificial Sequence: Synthetic epitope
NGTQVESVQL

SEQ ID NO: 29970 - protein, 10 aa, Artificial Sequence
  Description of Artificial Sequence: Synthetic epitope
NGTRVQEEPE

SEQ ID NO: 29971 - protein, 10 aa, Artificial Sequence
  Description of Artificial Sequence: Synthetic epitope
NGTVVMQKAS

SEQ ID NO: 29972 - protein, 10 aa, Artificial Sequence
  Description of Artificial Sequence: Synthetic epitope
NGVISNKAHQ

SEQ ID NO: 29973 - protein, 10 aa, Artificial Sequence
  Description of Artificial Sequence: Synthetic epitope
NGVNEAKIDE

SEQ ID NO: 29974 - protein, 10 aa, Artificial Sequence
  Description of Artificial Sequence: Synthetic epitope
NGVSRIKTGP

SEQ ID NO: 29975 - protein, 10 aa, Artificial Sequence
  Description of Artificial Sequence: Synthetic epitope
NGYEDHMAED

SEQ ID NO: 29976 - protein, 10 aa, Artificial Sequence
  Description of Artificial Sequence: Synthetic epitope
NGYFTAKARN

SEQ ID NO: 29977 - protein, 10 aa, Artificial Sequence
  Description of Artificial Sequence: Synthetic epitope
NHAIVSTSVG

SEQ ID NO: 29978 - protein, 10 aa, Artificial Sequence
  Description of Artificial Sequence: Synthetic epitope
NHAKMIVQEN

SEQ ID NO: 29979 - protein, 10 aa, Artificial Sequence
  Description of Artificial Sequence: Synthetic epitope
NHARLMVVEE

SEQ ID NO: 29980 - protein, 10 aa, Artificial Sequence
  Description of Artificial Sequence: Synthetic epitope
NHDFTKMEYD

SEQ ID NO: 29981 - protein, 10 aa, Artificial Sequence
  Description of Artificial Sequence: Synthetic epitope
NHDVVKISPK

SEQ ID NO: 29982 - protein, 10 aa, Artificial Sequence
  Description of Artificial Sequence: Synthetic epitope
NHDYMKQMTF

SEQ ID NO: 29983 - protein, 10 aa, Artificial Sequence
  Description of Artificial Sequence: Synthetic epitope
NHEQHHKAQV

SEQ ID NO: 29984 - protein, 10 aa, Artificial Sequence
  Description of Artificial Sequence: Synthetic epitope
NHERKSTLTP

SEQ ID NO: 29985 - protein, 10 aa, Artificial Sequence
  Description of Artificial Sequence: Synthetic epitope
NHEVKERHIQ

SEQ ID NO: 29986 - protein, 10 aa, Artificial Sequence
  Description of Artificial Sequence: Synthetic epitope
NHFKVKNVLT

SEQ ID NO: 29987 - protein, 10 aa, Artificial Sequence
  Description of Artificial Sequence: Synthetic epitope
NHGTANISTD

SEQ ID NO: 29988 - protein, 10 aa, Artificial Sequence
  Description of Artificial Sequence: Synthetic epitope
NHIKVQKVLE

SEQ ID NO: 29989 - protein, 10 aa, Artificial Sequence
  Description of Artificial Sequence: Synthetic epitope
NHITISHTQA

SEQ ID NO: 29990 - protein, 10 aa, Artificial Sequence
  Description of Artificial Sequence: Synthetic epitope
NHIVFENNQQ

SEQ ID NO: 29991 - protein, 10 aa, Artificial Sequence
  Description of Artificial Sequence: Synthetic epitope
NHIVKKIETE

SEQ ID NO: 29992 - protein, 10 aa, Artificial Sequence
  Description of Artificial Sequence: Synthetic epitope
NHKGSENKTD

SEQ ID NO: 29993 - protein, 10 aa, Artificial Sequence
  Description of Artificial Sequence: Synthetic epitope
NHKQVDVAKK

SEQ ID NO: 29994 - protein, 10 aa, Artificial Sequence
  Description of Artificial Sequence: Synthetic epitope
NHKRAEIQGK

SEQ ID NO: 29995 - protein, 10 aa, Artificial Sequence
  Description of Artificial Sequence: Synthetic epitope
NHKRAEIQGK

SEQ ID NO: 29996 - protein, 10 aa, Artificial Sequence
  Description of Artificial Sequence: Synthetic epitope
NHKREIHLNG

SEQ ID NO: 29997 - protein, 10 aa, Artificial Sequence
  Description of Artificial Sequence: Synthetic epitope
NHKTLLQKAA

SEQ ID NO: 29998 - protein, 10 aa, Artificial Sequence
  Description of Artificial Sequence: Synthetic epitope
NHKTYIDLIF

SEQ ID NO: 29999 - protein, 10 aa, Artificial Sequence
  Description of Artificial Sequence: Synthetic epitope
NHKVFEPVGM

SEQ ID NO: 30000 - protein, 10 aa, Artificial Sequence
  Description of Artificial Sequence: Synthetic epitope
NHKVNAETAK

SEQ ID NO: 30001 - protein, 10 aa, Artificial Sequence
  Description of Artificial Sequence: Synthetic epitope
NHLGLGATIN

SEQ ID NO: 30002 - protein, 10 aa, Artificial Sequence
  Description of Artificial Sequence: Synthetic epitope
NHLQQNKHNA

SEQ ID NO: 30003 - protein, 10 aa, Artificial Sequence
  Description of Artificial Sequence: Synthetic epitope
NHLSQVAQNT

SEQ ID NO: 30004 - protein, 10 aa, Artificial Sequence
  Description of Artificial Sequence: Synthetic epitope
NHLTSAPAKK

SEQ ID NO: 30005 - protein, 10 aa, Artificial Sequence
  Description of Artificial Sequence: Synthetic epitope
NHLTVVTQTS

SEQ ID NO: 30006 - protein, 10 aa, Artificial Sequence
  Description of Artificial Sequence: Synthetic epitope
NHMSFHAASE

SEQ ID NO: 30007 - protein, 10 aa, Artificial Sequence
  Description of Artificial Sequence: Synthetic epitope
NHNFSKRDAQ

SEQ ID NO: 30008 - protein, 10 aa, Artificial Sequence
  Description of Artificial Sequence: Synthetic epitope
NHNMQIWTTG

SEQ ID NO: 30009 - protein, 10 aa, Artificial Sequence
  Description of Artificial Sequence: Synthetic epitope
NHQMAQEDAQ

SEQ ID NO: 30010 - protein, 10 aa, Artificial Sequence
  Description of Artificial Sequence: Synthetic epitope
NHQYEGVTET

SEQ ID NO: 30011 - protein, 10 aa, Artificial Sequence
  Description of Artificial Sequence: Synthetic epitope
NHRDSESITD

SEQ ID NO: 30012 - protein, 10 aa, Artificial Sequence
  Description of Artificial Sequence: Synthetic epitope
NHRESVSSGE

SEQ ID NO: 30013 - protein, 10 aa, Artificial Sequence
  Description of Artificial Sequence: Synthetic epitope
NHRQSLVELE

SEQ ID NO: 30014 - protein, 10 aa, Artificial Sequence
  Description of Artificial Sequence: Synthetic epitope
NHRQYVSRPS

SEQ ID NO: 30015 - protein, 10 aa, Artificial Sequence
  Description of Artificial Sequence: Synthetic epitope
NHRSSAKDIH

SEQ ID NO: 30016 - protein, 10 aa, Artificial Sequence
  Description of Artificial Sequence: Synthetic epitope
NHSDSLSRSD

SEQ ID NO: 30017 - protein, 10 aa, Artificial Sequence
  Description of Artificial Sequence: Synthetic epitope
NHSIAMQNGK

SEQ ID NO: 30018 - protein, 10 aa, Artificial Sequence
  Description of Artificial Sequence: Synthetic epitope
NHSLWEPKVF

SEQ ID NO: 30019 - protein, 10 aa, Artificial Sequence
  Description of Artificial Sequence: Synthetic epitope
NHSNSKNVDV

SEQ ID NO: 30020 - protein, 10 aa, Artificial Sequence
  Description of Artificial Sequence: Synthetic epitope
NHSSIESDKI

SEQ ID NO: 30021 - protein, 10 aa, Artificial Sequence
  Description of Artificial Sequence: Synthetic epitope
NHTAEPSLQT

SEQ ID NO: 30022 - protein, 10 aa, Artificial Sequence
  Description of Artificial Sequence: Synthetic epitope
NHTEQSNFTS

SEQ ID NO: 30023 - protein, 10 aa, Artificial Sequence
  Description of Artificial Sequence: Synthetic epitope
NHTIAIRFAN

SEQ ID NO: 30024 - protein, 10 aa, Artificial Sequence
  Description of Artificial Sequence: Synthetic epitope
NHVELEMTES

SEQ ID NO: 30025 - protein, 10 aa, Artificial Sequence
  Description of Artificial Sequence: Synthetic epitope
NHVPTSTLVQ

SEQ ID NO: 30026 - protein, 10 aa, Artificial Sequence
  Description of Artificial Sequence: Synthetic epitope
NIAADRIRHE

SEQ ID NO: 30027 - protein, 10 aa, Artificial Sequence
  Description of Artificial Sequence: Synthetic epitope
NIAARNIVNR

SEQ ID NO: 30028 - protein, 10 aa, Artificial Sequence
  Description of Artificial Sequence: Synthetic epitope
NIAATASEKS

SEQ ID NO: 30029 - protein, 10 aa, Artificial Sequence
  Description of Artificial Sequence: Synthetic epitope
NIADLVIFTW

SEQ ID NO: 30030 - protein, 10 aa, Artificial Sequence
  Description of Artificial Sequence: Synthetic epitope
NIAEVQAVSR

SEQ ID NO: 30031 - protein, 10 aa, Artificial Sequence
  Description of Artificial Sequence: Synthetic epitope
NIAKISKYKR

SEQ ID NO: 30032 - protein, 10 aa, Artificial Sequence
  Description of Artificial Sequence: Synthetic epitope
NIAKISKYKR

SEQ ID NO: 30033 - protein, 10 aa, Artificial Sequence
  Description of Artificial Sequence: Synthetic epitope
NIAQKRMQGS

SEQ ID NO: 30034 - protein, 10 aa, Artificial Sequence
  Description of Artificial Sequence: Synthetic epitope
NIARSSQRMI

SEQ ID NO: 30035 - protein, 10 aa, Artificial Sequence
  Description of Artificial Sequence: Synthetic epitope
NIARTVTLDQ

SEQ ID NO: 30036 - protein, 10 aa, Artificial Sequence
  Description of Artificial Sequence: Synthetic epitope
NIASKLSLQE

SEQ ID NO: 30037 - protein, 10 aa, Artificial Sequence
  Description of Artificial Sequence: Synthetic epitope
NIASLLTKSQ

SEQ ID NO: 30038 - protein, 10 aa, Artificial Sequence
  Description of Artificial Sequence: Synthetic epitope
NIASSIEALS

SEQ ID NO: 30039 - protein, 10 aa, Artificial Sequence
  Description of Artificial Sequence: Synthetic epitope
NIATSKRANK

SEQ ID NO: 30040 - protein, 10 aa, Artificial Sequence
  Description of Artificial Sequence: Synthetic epitope
NIDEGAILAA

SEQ ID NO: 30041 - protein, 10 aa, Artificial Sequence
  Description of Artificial Sequence: Synthetic epitope
NIDKADTGKN

SEQ ID NO: 30042 - protein, 10 aa, Artificial Sequence
  Description of Artificial Sequence: Synthetic epitope
NIDQWSMLGD

SEQ ID NO: 30043 - protein, 10 aa, Artificial Sequence
  Description of Artificial Sequence: Synthetic epitope
NIDRSGFTYS

SEQ ID NO: 30044 - protein, 10 aa, Artificial Sequence
  Description of Artificial Sequence: Synthetic epitope
NIEKAFKEEQ

SEQ ID NO: 30045 - protein, 10 aa, Artificial Sequence
  Description of Artificial Sequence: Synthetic epitope
NIEKTVKVYE

SEQ ID NO: 30046 - protein, 10 aa, Artificial Sequence
  Description of Artificial Sequence: Synthetic epitope
NIERLQLVST

SEQ ID NO: 30047 - protein, 10 aa, Artificial Sequence
  Description of Artificial Sequence: Synthetic epitope
NIESARAELE

SEQ ID NO: 30048 - protein, 10 aa, Artificial Sequence
  Description of Artificial Sequence: Synthetic epitope
NIFDVKQANA

SEQ ID NO: 30049 - protein, 10 aa, Artificial Sequence
  Description of Artificial Sequence: Synthetic epitope
NIFSEASNSE

SEQ ID NO: 30050 - protein, 10 aa, Artificial Sequence
  Description of Artificial Sequence: Synthetic epitope
NIGSSAAKGT

SEQ ID NO: 30051 - protein, 10 aa, Artificial Sequence
  Description of Artificial Sequence: Synthetic epitope
NIHIFIDNST

SEQ ID NO: 30052 - protein, 10 aa, Artificial Sequence
  Description of Artificial Sequence: Synthetic epitope
NIHNQAHMNR

SEQ ID NO: 30053 - protein, 10 aa, Artificial Sequence
  Description of Artificial Sequence: Synthetic epitope
NIIEEKETED

SEQ ID NO: 30054 - protein, 10 aa, Artificial Sequence
  Description of Artificial Sequence: Synthetic epitope
NIIKSKIDIK

SEQ ID NO: 30055 - protein, 10 aa, Artificial Sequence
  Description of Artificial Sequence: Synthetic epitope
NIILAEIFDF

SEQ ID NO: 30056 - protein, 10 aa, Artificial Sequence
  Description of Artificial Sequence: Synthetic epitope
NIIMAMVKAG

SEQ ID NO: 30057 - protein, 10 aa, Artificial Sequence
  Description of Artificial Sequence: Synthetic epitope
NIIPLLVTSN

SEQ ID NO: 30058 - protein, 10 aa, Artificial Sequence
  Description of Artificial Sequence: Synthetic epitope
NIISDMLAVI

SEQ ID NO: 30059 - protein, 10 aa, Artificial Sequence
  Description of Artificial Sequence: Synthetic epitope
NIITPISLDD

SEQ ID NO: 30060 - protein, 10 aa, Artificial Sequence
  Description of Artificial Sequence: Synthetic epitope
NIKAQQKPQP

SEQ ID NO: 30061 - protein, 10 aa, Artificial Sequence
  Description of Artificial Sequence: Synthetic epitope
NIKASFVDEH

SEQ ID NO: 30062 - protein, 10 aa, Artificial Sequence
  Description of Artificial Sequence: Synthetic epitope
NIKEFTAQNL

SEQ ID NO: 30063 - protein, 10 aa, Artificial Sequence
  Description of Artificial Sequence: Synthetic epitope
NIKESARLDP

SEQ ID NO: 30064 - protein, 10 aa, Artificial Sequence
  Description of Artificial Sequence: Synthetic epitope
NIKLAGSLQH

SEQ ID NO: 30065 - protein, 10 aa, Artificial Sequence
  Description of Artificial Sequence: Synthetic epitope
NIKLDKIMKE

SEQ ID NO: 30066 - protein, 10 aa, Artificial Sequence
  Description of Artificial Sequence: Synthetic epitope
NIKLNQSSPD

SEQ ID NO: 30067 - protein, 10 aa, Artificial Sequence
  Description of Artificial Sequence: Synthetic epitope
NIKQDQKSSQ

SEQ ID NO: 30068 - protein, 10 aa, Artificial Sequence
  Description of Artificial Sequence: Synthetic epitope
NIKSALSQSR

SEQ ID NO: 30069 - protein, 10 aa, Artificial Sequence
  Description of Artificial Sequence: Synthetic epitope
NIKSMDPASG

SEQ ID NO: 30070 - protein, 10 aa, Artificial Sequence
  Description of Artificial Sequence: Synthetic epitope
NIKTNAQRNK

SEQ ID NO: 30071 - protein, 10 aa, Artificial Sequence
  Description of Artificial Sequence: Synthetic epitope
NILDSIDFSQ

SEQ ID NO: 30072 - protein, 10 aa, Artificial Sequence
  Description of Artificial Sequence: Synthetic epitope
NILESSFLMN

SEQ ID NO: 30073 - protein, 10 aa, Artificial Sequence
  Description of Artificial Sequence: Synthetic epitope
NILKLVVSRS

SEQ ID NO: 30074 - protein, 10 aa, Artificial Sequence
  Description of Artificial Sequence: Synthetic epitope
NILQNEKSHQ

SEQ ID NO: 30075 - protein, 10 aa, Artificial Sequence
  Description of Artificial Sequence: Synthetic epitope
NILQQLAVAM

SEQ ID NO: 30076 - protein, 10 aa, Artificial Sequence
  Description of Artificial Sequence: Synthetic epitope
NILVSRYINN

SEQ ID NO: 30077 - protein, 10 aa, Artificial Sequence
  Description of Artificial Sequence: Synthetic epitope
NIMKETPSEE

SEQ ID NO: 30078 - protein, 10 aa, Artificial Sequence
  Description of Artificial Sequence: Synthetic epitope
NIMKQTMVDS

SEQ ID NO: 30079 - protein, 10 aa, Artificial Sequence
  Description of Artificial Sequence: Synthetic epitope
NIMKSNIDKK

SEQ ID NO: 30080 - protein, 10 aa, Artificial Sequence
  Description of Artificial Sequence: Synthetic epitope
NIMLKLTFST

SEQ ID NO: 30081 - protein, 10 aa, Artificial Sequence
  Description of Artificial Sequence: Synthetic epitope
NINKRTMHKY

SEQ ID NO: 30082 - protein, 10 aa, Artificial Sequence
  Description of Artificial Sequence: Synthetic epitope
NINPSTANSP

SEQ ID NO: 30083 - protein, 10 aa, Artificial Sequence
  Description of Artificial Sequence: Synthetic epitope
NINSYMMPIP

SEQ ID NO: 30084 - protein, 10 aa, Artificial Sequence
  Description of Artificial Sequence: Synthetic epitope
NINTKSDVQE

SEQ ID NO: 30085 - protein, 10 aa, Artificial Sequence
  Description of Artificial Sequence: Synthetic epitope
NINTSTSKFL

SEQ ID NO: 30086 - protein, 10 aa, Artificial Sequence
  Description of Artificial Sequence: Synthetic epitope
NINVEAMELE

SEQ ID NO: 30087 - protein, 10 aa, Artificial Sequence
  Description of Artificial Sequence: Synthetic epitope
NINVTSEPHE

SEQ ID NO: 30088 - protein, 10 aa, Artificial Sequence
  Description of Artificial Sequence: Synthetic epitope
NIPDKDRQIE

SEQ ID NO: 30089 - protein, 10 aa, Artificial Sequence
  Description of Artificial Sequence: Synthetic epitope
NIQAEQAGTA

SEQ ID NO: 30090 - protein, 10 aa, Artificial Sequence
  Description of Artificial Sequence: Synthetic epitope
NIQAVSLKIQ

SEQ ID NO: 30091 - protein, 10 aa, Artificial Sequence
  Description of Artificial Sequence: Synthetic epitope
NIQDSIAKQI

SEQ ID NO: 30092 - protein, 10 aa, Artificial Sequence
  Description of Artificial Sequence: Synthetic epitope
NIQEAVEGAM

SEQ ID NO: 30093 - protein, 10 aa, Artificial Sequence
  Description of Artificial Sequence: Synthetic epitope
NIQFNDKVNK

SEQ ID NO: 30094 - protein, 10 aa, Artificial Sequence
  Description of Artificial Sequence: Synthetic epitope
NIQIKTLADD

SEQ ID NO: 30095 - protein, 10 aa, Artificial Sequence
  Description of Artificial Sequence: Synthetic epitope
NIQSKSSKAV

SEQ ID NO: 30096 - protein, 10 aa, Artificial Sequence
  Description of Artificial Sequence: Synthetic epitope
NIRAKNVAQN

SEQ ID NO: 30097 - protein, 10 aa, Artificial Sequence
  Description of Artificial Sequence: Synthetic epitope
NIREAISKAK

SEQ ID NO: 30098 - protein, 10 aa, Artificial Sequence
  Description of Artificial Sequence: Synthetic epitope
NIRTYMLART

SEQ ID NO: 30099 - protein, 10 aa, Artificial Sequence
  Description of Artificial Sequence: Synthetic epitope
NISASLKNQP

SEQ ID NO: 30100 - protein, 10 aa, Artificial Sequence
  Description of Artificial Sequence: Synthetic epitope
NISDLGKGRQ

SEQ ID NO: 30101 - protein, 10 aa, Artificial Sequence
  Description of Artificial Sequence: Synthetic epitope
NISDSVKQQN

SEQ ID NO: 30102 - protein, 10 aa, Artificial Sequence
  Description of Artificial Sequence: Synthetic epitope
NISKEARSAI

SEQ ID NO: 30103 - protein, 10 aa, Artificial Sequence
  Description of Artificial Sequence: Synthetic epitope
NISKKAAQRM

SEQ ID NO: 30104 - protein, 10 aa, Artificial Sequence
  Description of Artificial Sequence: Synthetic epitope
NISKMAELFM

SEQ ID NO: 30105 - protein, 10 aa, Artificial Sequence
  Description of Artificial Sequence: Synthetic epitope
NISKSVTRED

SEQ ID NO: 30106 - protein, 10 aa, Artificial Sequence
  Description of Artificial Sequence: Synthetic epitope
NISPTSKLVS

SEQ ID NO: 30107 - protein, 10 aa, Artificial Sequence
  Description of Artificial Sequence: Synthetic epitope
NISSELNKDS

SEQ ID NO: 30108 - protein, 10 aa, Artificial Sequence
  Description of Artificial Sequence: Synthetic epitope
NISTATAAQT

SEQ ID NO: 30109 - protein, 10 aa, Artificial Sequence
  Description of Artificial Sequence: Synthetic epitope
NISTDSLQGG

SEQ ID NO: 30110 - protein, 10 aa, Artificial Sequence
  Description of Artificial Sequence: Synthetic epitope
NISTIATVEE

SEQ ID NO: 30111 - protein, 10 aa, Artificial Sequence
  Description of Artificial Sequence: Synthetic epitope
NISVDTEIEN

SEQ ID NO: 30112 - protein, 10 aa, Artificial Sequence
  Description of Artificial Sequence: Synthetic epitope
NISVVAVDAV

SEQ ID NO: 30113 - protein, 10 aa, Artificial Sequence
  Description of Artificial Sequence: Synthetic epitope
NITFMTKEKT

SEQ ID NO: 30114 - protein, 10 aa, Artificial Sequence
  Description of Artificial Sequence: Synthetic epitope
NITISTTAHM

SEQ ID NO: 30115 - protein, 10 aa, Artificial Sequence
  Description of Artificial Sequence: Synthetic epitope
NITPAVRTEY

SEQ ID NO: 30116 - protein, 10 aa, Artificial Sequence
  Description of Artificial Sequence: Synthetic epitope
NITQNQKAPL

SEQ ID NO: 30117 - protein, 10 aa, Artificial Sequence
  Description of Artificial Sequence: Synthetic epitope
NITSPDPKSY

SEQ ID NO: 30118 - protein, 10 aa, Artificial Sequence
  Description of Artificial Sequence: Synthetic epitope
NITSSIMQKV

SEQ ID NO: 30119 - protein, 10 aa, Artificial Sequence
  Description of Artificial Sequence: Synthetic epitope
NITSSMDVKE

SEQ ID NO: 30120 - protein, 10 aa, Artificial Sequence
  Description of Artificial Sequence: Synthetic epitope
NITTAATEII

SEQ ID NO: 30121 - protein, 10 aa, Artificial Sequence
  Description of Artificial Sequence: Synthetic epitope
NITTSNLIED

SEQ ID NO: 30122 - protein, 10 aa, Artificial Sequence
  Description of Artificial Sequence: Synthetic epitope
NIVAANLNES

SEQ ID NO: 30123 - protein, 10 aa, Artificial Sequence
  Description of Artificial Sequence: Synthetic epitope
NIVIPLIKKN

SEQ ID NO: 30124 - protein, 10 aa, Artificial Sequence
  Description of Artificial Sequence: Synthetic epitope
NIVKNELQEP

SEQ ID NO: 30125 - protein, 10 aa, Artificial Sequence
  Description of Artificial Sequence: Synthetic epitope
NIVLKSSRSS

SEQ ID NO: 30126 - protein, 10 aa, Artificial Sequence
  Description of Artificial Sequence: Synthetic epitope
NIVLVLDITS

SEQ ID NO: 30127 - protein, 10 aa, Artificial Sequence
  Description of Artificial Sequence: Synthetic epitope
NIVQDKIMQQ

SEQ ID NO: 30128 - protein, 10 aa, Artificial Sequence
  Description of Artificial Sequence: Synthetic epitope
NIVSGPPSHK

SEQ ID NO: 30129 - protein, 10 aa, Artificial Sequence
  Description of Artificial Sequence: Synthetic epitope
NIVSKVALFQ

SEQ ID NO: 30130 - protein, 10 aa, Artificial Sequence
  Description of Artificial Sequence: Synthetic epitope
NIVTTKAKVD

SEQ ID NO: 30131 - protein, 10 aa, Artificial Sequence
  Description of Artificial Sequence: Synthetic epitope
NIVVEAMKAF

SEQ ID NO: 30132 - protein, 10 aa, Artificial Sequence
  Description of Artificial Sequence: Synthetic epitope
NIYRLSQNKT

SEQ ID NO: 30133 - protein, 10 aa, Artificial Sequence
  Description of Artificial Sequence: Synthetic epitope
NKAAEEGQKA

SEQ ID NO: 30134 - protein, 10 aa, Artificial Sequence
  Description of Artificial Sequence: Synthetic epitope
NKAASQQGTP

SEQ ID NO: 30135 - protein, 10 aa, Artificial Sequence
  Description of Artificial Sequence: Synthetic epitope
NKAEHYTAKV

SEQ ID NO: 30136 - protein, 10 aa, Artificial Sequence
  Description of Artificial Sequence: Synthetic epitope
NKAESALAQQ

SEQ ID NO: 30137 - protein, 10 aa, Artificial Sequence
  Description of Artificial Sequence: Synthetic epitope
NKAIEMNINK

SEQ ID NO: 30138 - protein, 10 aa, Artificial Sequence
  Description of Artificial Sequence: Synthetic epitope
NKAKTLATWA

SEQ ID NO: 30139 - protein, 10 aa, Artificial Sequence
  Description of Artificial Sequence: Synthetic epitope
NKALGLSTDD

SEQ ID NO: 30140 - protein, 10 aa, Artificial Sequence
  Description of Artificial Sequence: Synthetic epitope
NKAMQLVARQ

SEQ ID NO: 30141 - protein, 10 aa, Artificial Sequence
  Description of Artificial Sequence: Synthetic epitope
NKAQAAVQAG

SEQ ID NO: 30142 - protein, 10 aa, Artificial Sequence
  Description of Artificial Sequence: Synthetic epitope
NKAQSHQLFA

SEQ ID NO: 30143 - protein, 10 aa, Artificial Sequence
  Description of Artificial Sequence: Synthetic epitope
NKAQTVLNGN

SEQ ID NO: 30144 - protein, 10 aa, Artificial Sequence
  Description of Artificial Sequence: Synthetic epitope
NKARARVEKW

SEQ ID NO: 30145 - protein, 10 aa, Artificial Sequence
  Description of Artificial Sequence: Synthetic epitope
NKASLLSSKK

SEQ ID NO: 30146 - protein, 10 aa, Artificial Sequence
  Description of Artificial Sequence: Synthetic epitope
NKASQGSTLV

SEQ ID NO: 30147 - protein, 10 aa, Artificial Sequence
  Description of Artificial Sequence: Synthetic epitope
NKATKEKESD

SEQ ID NO: 30148 - protein, 10 aa, Artificial Sequence
  Description of Artificial Sequence: Synthetic epitope
NKAVKDNHDR

SEQ ID NO: 30149 - protein, 10 aa, Artificial Sequence
  Description of Artificial Sequence: Synthetic epitope
NKAVQSVRLP

SEQ ID NO: 30150 - protein, 10 aa, Artificial Sequence
  Description of Artificial Sequence: Synthetic epitope
NKAWVESREK

SEQ ID NO: 30151 - protein, 10 aa, Artificial Sequence
  Description of Artificial Sequence: Synthetic epitope
NKAYQYTQQN

SEQ ID NO: 30152 - protein, 10 aa, Artificial Sequence
  Description of Artificial Sequence: Synthetic epitope
NKDEADLSSK

SEQ ID NO: 30153 - protein, 10 aa, Artificial Sequence
  Description of Artificial Sequence: Synthetic epitope
NKDERVIAER

SEQ ID NO: 30154 - protein, 10 aa, Artificial Sequence
  Description of Artificial Sequence: Synthetic epitope
NKDKTLEKHL

SEQ ID NO: 30155 - protein, 10 aa, Artificial Sequence
  Description of Artificial Sequence: Synthetic epitope
NKDNASLKQL

SEQ ID NO: 30156 - protein, 10 aa, Artificial Sequence
  Description of Artificial Sequence: Synthetic epitope
NKDQLESVLE

SEQ ID NO: 30157 - protein, 10 aa, Artificial Sequence
  Description of Artificial Sequence: Synthetic epitope
NKDSEQLRIK

SEQ ID NO: 30158 - protein, 10 aa, Artificial Sequence
  Description of Artificial Sequence: Synthetic epitope
NKDSKMYRAL

SEQ ID NO: 30159 - protein, 10 aa, Artificial Sequence
  Description of Artificial Sequence: Synthetic epitope
NKDSNSIIKD

SEQ ID NO: 30160 - protein, 10 aa, Artificial Sequence
  Description of Artificial Sequence: Synthetic epitope
NKDSSQSPSQ

SEQ ID NO: 30161 - protein, 10 aa, Artificial Sequence
  Description of Artificial Sequence: Synthetic epitope
NKEKARQLSL

SEQ ID NO: 30162 - protein, 10 aa, Artificial Sequence
  Description of Artificial Sequence: Synthetic epitope
NKEKTKSASE

SEQ ID NO: 30163 - protein, 10 aa, Artificial Sequence
  Description of Artificial Sequence: Synthetic epitope
NKELEITKEK

SEQ ID NO: 30164 - protein, 10 aa, Artificial Sequence
  Description of Artificial Sequence: Synthetic epitope
NKELTFLLFS

SEQ ID NO: 30165 - protein, 10 aa, Artificial Sequence
  Description of Artificial Sequence: Synthetic epitope
NKELTKERDA

SEQ ID NO: 30166 - protein, 10 aa, Artificial Sequence
  Description of Artificial Sequence: Synthetic epitope
NKEPNIVSDA

SEQ ID NO: 30167 - protein, 10 aa, Artificial Sequence
  Description of Artificial Sequence: Synthetic epitope
NKESEALGGP

SEQ ID NO: 30168 - protein, 10 aa, Artificial Sequence
  Description of Artificial Sequence: Synthetic epitope
NKESKVNNEK

SEQ ID NO: 30169 - protein, 10 aa, Artificial Sequence
  Description of Artificial Sequence: Synthetic epitope
NKESWYSTSE

SEQ ID NO: 30170 - protein, 10 aa, Artificial Sequence
  Description of Artificial Sequence: Synthetic epitope
NKEVASAVSA

SEQ ID NO: 30171 - protein, 10 aa, Artificial Sequence
  Description of Artificial Sequence: Synthetic epitope
NKEVGRLGNK

SEQ ID NO: 30172 - protein, 10 aa, Artificial Sequence
  Description of Artificial Sequence: Synthetic epitope
NKEVIMAMKK

SEQ ID NO: 30173 - protein, 10 aa, Artificial Sequence
  Description of Artificial Sequence: Synthetic epitope
NKEVKASRDQ

SEQ ID NO: 30174 - protein, 10 aa, Artificial Sequence
  Description of Artificial Sequence: Synthetic epitope
NKGASTLRTL

SEQ ID NO: 30175 - protein, 10 aa, Artificial Sequence
  Description of Artificial Sequence: Synthetic epitope
NKGAVNVGGQ

SEQ ID NO: 30176 - protein, 10 aa, Artificial Sequence
  Description of Artificial Sequence: Synthetic epitope
NKGEKSSTEQ

SEQ ID NO: 30177 - protein, 10 aa, Artificial Sequence
  Description of Artificial Sequence: Synthetic epitope
NKGIEMHQRL

SEQ ID NO: 30178 - protein, 10 aa, Artificial Sequence
  Description of Artificial Sequence: Synthetic epitope
NKGKMAKKEE

SEQ ID NO: 30179 - protein, 10 aa, Artificial Sequence
  Description of Artificial Sequence: Synthetic epitope
NKGLLETTVQ

SEQ ID NO: 30180 - protein, 10 aa, Artificial Sequence
  Description of Artificial Sequence: Synthetic epitope
NKGPASSNRD

SEQ ID NO: 30181 - protein, 10 aa, Artificial Sequence
  Description of Artificial Sequence: Synthetic epitope
NKGPASSNRD

SEQ ID NO: 30182 - protein, 10 aa, Artificial Sequence
  Description of Artificial Sequence: Synthetic epitope
NKGSMVSSDA

SEQ ID NO: 30183 - protein, 10 aa, Artificial Sequence
  Description of Artificial Sequence: Synthetic epitope
NKIAKEDAVL

SEQ ID NO: 30184 - protein, 10 aa, Artificial Sequence
  Description of Artificial Sequence: Synthetic epitope
NKIISASIGN

SEQ ID NO: 30185 - protein, 10 aa, Artificial Sequence
  Description of Artificial Sequence: Synthetic epitope
NKILAQVEEK

SEQ ID NO: 30186 - protein, 10 aa, Artificial Sequence
  Description of Artificial Sequence: Synthetic epitope
NKILQINKDD

SEQ ID NO: 30187 - protein, 10 aa, Artificial Sequence
  Description of Artificial Sequence: Synthetic epitope
NKIQNAPSRK

SEQ ID NO: 30188 - protein, 10 aa, Artificial Sequence
  Description of Artificial Sequence: Synthetic epitope
NKITVVSEKQ

SEQ ID NO: 30189 - protein, 10 aa, Artificial Sequence
  Description of Artificial Sequence: Synthetic epitope
NKIVAAKDSD

SEQ ID NO: 30190 - protein, 10 aa, Artificial Sequence
  Description of Artificial Sequence: Synthetic epitope
NKIYMEQQTD

SEQ ID NO: 30191 - protein, 10 aa, Artificial Sequence
  Description of Artificial Sequence: Synthetic epitope
NKKAGDLANE

SEQ ID NO: 30192 - protein, 10 aa, Artificial Sequence
  Description of Artificial Sequence: Synthetic epitope
NKKASSVETK

SEQ ID NO: 30193 - protein, 10 aa, Artificial Sequence
  Description of Artificial Sequence: Synthetic epitope
NKKAVTGENN

SEQ ID NO: 30194 - protein, 10 aa, Artificial Sequence
  Description of Artificial Sequence: Synthetic epitope
NKKDSDRNEQ

SEQ ID NO: 30195 - protein, 10 aa, Artificial Sequence
  Description of Artificial Sequence: Synthetic epitope
NKKDYGVTPE

SEQ ID NO: 30196 - protein, 10 aa, Artificial Sequence
  Description of Artificial Sequence: Synthetic epitope
NKKEELVAEQ

SEQ ID NO: 30197 - protein, 10 aa, Artificial Sequence
  Description of Artificial Sequence: Synthetic epitope
NKKEELVAEQ

SEQ ID NO: 30198 - protein, 10 aa, Artificial Sequence
  Description of Artificial Sequence: Synthetic epitope
NKKEKATGRE

SEQ ID NO: 30199 - protein, 10 aa, Artificial Sequence
  Description of Artificial Sequence: Synthetic epitope
NKKENPNQTA

SEQ ID NO: 30200 - protein, 10 aa, Artificial Sequence
  Description of Artificial Sequence: Synthetic epitope
NKKFMAASVA

SEQ ID NO: 30201 - protein, 10 aa, Artificial Sequence
  Description of Artificial Sequence: Synthetic epitope
NKKGNSASKR

SEQ ID NO: 30202 - protein, 10 aa, Artificial Sequence
  Description of Artificial Sequence: Synthetic epitope
NKKILKSAKD

SEQ ID NO: 30203 - protein, 10 aa, Artificial Sequence
  Description of Artificial Sequence: Synthetic epitope
NKKINATVRT

SEQ ID NO: 30204 - protein, 10 aa, Artificial Sequence
  Description of Artificial Sequence: Synthetic epitope
NKKIQQLESE

SEQ ID NO: 30205 - protein, 10 aa, Artificial Sequence
  Description of Artificial Sequence: Synthetic epitope
NKKIYKIGQG

SEQ ID NO: 30206 - protein, 10 aa, Artificial Sequence
  Description of Artificial Sequence: Synthetic epitope
NKKLTKQKSS

SEQ ID NO: 30207 - protein, 10 aa, Artificial Sequence
  Description of Artificial Sequence: Synthetic epitope
NKKMKTLKDV

SEQ ID NO: 30208 - protein, 10 aa, Artificial Sequence
  Description of Artificial Sequence: Synthetic epitope
NKKPKEEKFS

SEQ ID NO: 30209 - protein, 10 aa, Artificial Sequence
  Description of Artificial Sequence: Synthetic epitope
NKKPTQASIT

SEQ ID NO: 30210 - protein, 10 aa, Artificial Sequence
  Description of Artificial Sequence: Synthetic epitope
NKKRRATNIE

SEQ ID NO: 30211 - protein, 10 aa, Artificial Sequence
  Description of Artificial Sequence: Synthetic epitope
NKKSKAKEPP

SEQ ID NO: 30212 - protein, 10 aa, Artificial Sequence
  Description of Artificial Sequence: Synthetic epitope
NKKSPIKASD

SEQ ID NO: 30213 - protein, 10 aa, Artificial Sequence
  Description of Artificial Sequence: Synthetic epitope
NKKTTIEKLR

SEQ ID NO: 30214 - protein, 10 aa, Artificial Sequence
  Description of Artificial Sequence: Synthetic epitope
NKKVSIDSLK

SEQ ID NO: 30215 - protein, 10 aa, Artificial Sequence
  Description of Artificial Sequence: Synthetic epitope
NKLETMYNHW

SEQ ID NO: 30216 - protein, 10 aa, Artificial Sequence
  Description of Artificial Sequence: Synthetic epitope
NKLFSMLQVH

SEQ ID NO: 30217 - protein, 10 aa, Artificial Sequence
  Description of Artificial Sequence: Synthetic epitope
NKLIAQKQLE

SEQ ID NO: 30218 - protein, 10 aa, Artificial Sequence
  Description of Artificial Sequence: Synthetic epitope
NKLKSVKSPV

SEQ ID NO: 30219 - protein, 10 aa, Artificial Sequence
  Description of Artificial Sequence: Synthetic epitope
NKLLASQLEE

SEQ ID NO: 30220 - protein, 10 aa, Artificial Sequence
  Description of Artificial Sequence: Synthetic epitope
NKLLESQSKK

SEQ ID NO: 30221 - protein, 10 aa, Artificial Sequence
  Description of Artificial Sequence: Synthetic epitope
NKLNKNTVEK

SEQ ID NO: 30222 - protein, 10 aa, Artificial Sequence
  Description of Artificial Sequence: Synthetic epitope
NKLNLGIHKI

SEQ ID NO: 30223 - protein, 10 aa, Artificial Sequence
  Description of Artificial Sequence: Synthetic epitope
NKLQKTAHPL

SEQ ID NO: 30224 - protein, 10 aa, Artificial Sequence
  Description of Artificial Sequence: Synthetic epitope
NKLRETGKEA

SEQ ID NO: 30225 - protein, 10 aa, Artificial Sequence
  Description of Artificial Sequence: Synthetic epitope
NKLSILASKL

SEQ ID NO: 30226 - protein, 10 aa, Artificial Sequence
  Description of Artificial Sequence: Synthetic epitope
NKLSQLMGES

SEQ ID NO: 30227 - protein, 10 aa, Artificial Sequence
  Description of Artificial Sequence: Synthetic epitope
NKLSSVRPTN

SEQ ID NO: 30228 - protein, 10 aa, Artificial Sequence
  Description of Artificial Sequence: Synthetic epitope
NKLTSHLESK

SEQ ID NO: 30229 - protein, 10 aa, Artificial Sequence
  Description of Artificial Sequence: Synthetic epitope
NKLVLSLLSG

SEQ ID NO: 30230 - protein, 10 aa, Artificial Sequence
  Description of Artificial Sequence: Synthetic epitope
NKMAAKSAKA

SEQ ID NO: 30231 - protein, 10 aa, Artificial Sequence
  Description of Artificial Sequence: Synthetic epitope
NKMEGRNFVY

SEQ ID NO: 30232 - protein, 10 aa, Artificial Sequence
  Description of Artificial Sequence: Synthetic epitope
NKMFLGDNAH

SEQ ID NO: 30233 - protein, 10 aa, Artificial Sequence
  Description of Artificial Sequence: Synthetic epitope
NKMHISQSIE

SEQ ID NO: 30234 - protein, 10 aa, Artificial Sequence
  Description of Artificial Sequence: Synthetic epitope
NKMISHIQDV

SEQ ID NO: 30235 - protein, 10 aa, Artificial Sequence
  Description of Artificial Sequence: Synthetic epitope
NKMLSNVAER

SEQ ID NO: 30236 - protein, 10 aa, Artificial Sequence
  Description of Artificial Sequence: Synthetic epitope
NKMNSDRVPD

SEQ ID NO: 30237 - protein, 10 aa, Artificial Sequence
  Description of Artificial Sequence: Synthetic epitope
NKMPDMAYER

SEQ ID NO: 30238 - protein, 10 aa, Artificial Sequence
  Description of Artificial Sequence: Synthetic epitope
NKMRGAGNDI

SEQ ID NO: 30239 - protein, 10 aa, Artificial Sequence
  Description of Artificial Sequence: Synthetic epitope
NKMRQKRKEE

SEQ ID NO: 30240 - protein, 10 aa, Artificial Sequence
  Description of Artificial Sequence: Synthetic epitope
NKMSLQMKMD

SEQ ID NO: 30241 - protein, 10 aa, Artificial Sequence
  Description of Artificial Sequence: Synthetic epitope
NKMTAISPEP

SEQ ID NO: 30242 - protein, 10 aa, Artificial Sequence
  Description of Artificial Sequence: Synthetic epitope
NKMTQKDITF

SEQ ID NO: 30243 - protein, 10 aa, Artificial Sequence
  Description of Artificial Sequence: Synthetic epitope
NKMVATSGVK

SEQ ID NO: 30244 - protein, 10 aa, Artificial Sequence
  Description of Artificial Sequence: Synthetic epitope
NKNAAIKLSI

SEQ ID NO: 30245 - protein, 10 aa, Artificial Sequence
  Description of Artificial Sequence: Synthetic epitope
NKNARATLSS

SEQ ID NO: 30246 - protein, 10 aa, Artificial Sequence
  Description of Artificial Sequence: Synthetic epitope
NKNKTGMAVE

SEQ ID NO: 30247 - protein, 10 aa, Artificial Sequence
  Description of Artificial Sequence: Synthetic epitope
NKNSLKIEIP

SEQ ID NO: 30248 - protein, 10 aa, Artificial Sequence
  Description of Artificial Sequence: Synthetic epitope
NKNVKFTAQE

SEQ ID NO: 30249 - protein, 10 aa, Artificial Sequence
  Description of Artificial Sequence: Synthetic epitope
NKNVKRNKSQ

SEQ ID NO: 30250 - protein, 10 aa, Artificial Sequence
  Description of Artificial Sequence: Synthetic epitope
NKPAQESTTG

SEQ ID NO: 30251 - protein, 10 aa, Artificial Sequence
  Description of Artificial Sequence: Synthetic epitope
NKPRTMKNQQ

SEQ ID NO: 30252 - protein, 10 aa, Artificial Sequence
  Description of Artificial Sequence: Synthetic epitope
NKPVARQAPG

SEQ ID NO: 30253 - protein, 10 aa, Artificial Sequence
  Description of Artificial Sequence: Synthetic epitope
NKPYMTRKVQ

SEQ ID NO: 30254 - protein, 10 aa, Artificial Sequence
  Description of Artificial Sequence: Synthetic epitope
NKQANAGPYL

SEQ ID NO: 30255 - protein, 10 aa, Artificial Sequence
  Description of Artificial Sequence: Synthetic epitope
NKQELEYKSK

SEQ ID NO: 30256 - protein, 10 aa, Artificial Sequence
  Description of Artificial Sequence: Synthetic epitope
NKQFTAVKND

SEQ ID NO: 30257 - protein, 10 aa, Artificial Sequence
  Description of Artificial Sequence: Synthetic epitope
NKQGDKSKEN

SEQ ID NO: 30258 - protein, 10 aa, Artificial Sequence
  Description of Artificial Sequence: Synthetic epitope
NKQNQMRPID

SEQ ID NO: 30259 - protein, 10 aa, Artificial Sequence
  Description of Artificial Sequence: Synthetic epitope
NKQRATAATG

SEQ ID NO: 30260 - protein, 10 aa, Artificial Sequence
  Description of Artificial Sequence: Synthetic epitope
NKQRMSNLAQ

SEQ ID NO: 30261 - protein, 10 aa, Artificial Sequence
  Description of Artificial Sequence: Synthetic epitope
NKQSEILSML

SEQ ID NO: 30262 - protein, 10 aa, Artificial Sequence
  Description of Artificial Sequence: Synthetic epitope
NKQTGQIIED

SEQ ID NO: 30263 - protein, 10 aa, Artificial Sequence
  Description of Artificial Sequence: Synthetic epitope
NKQYMMVKSD

SEQ ID NO: 30264 - protein, 10 aa, Artificial Sequence
  Description of Artificial Sequence: Synthetic epitope
NKRARLKRKT

SEQ ID NO: 30265 - protein, 10 aa, Artificial Sequence
  Description of Artificial Sequence: Synthetic epitope
NKRDTRSIEE

SEQ ID NO: 30266 - protein, 10 aa, Artificial Sequence
  Description of Artificial Sequence: Synthetic epitope
NKRESKGSSN

SEQ ID NO: 30267 - protein, 10 aa, Artificial Sequence
  Description of Artificial Sequence: Synthetic epitope
NKRHMAEVNA

SEQ ID NO: 30268 - protein, 10 aa, Artificial Sequence
  Description of Artificial Sequence: Synthetic epitope
NKRKKSPQMN

SEQ ID NO: 30269 - protein, 10 aa, Artificial Sequence
  Description of Artificial Sequence: Synthetic epitope
NKRNSNSVTN

SEQ ID NO: 30270 - protein, 10 aa, Artificial Sequence
  Description of Artificial Sequence: Synthetic epitope
NKRPDYNEMV

SEQ ID NO: 30271 - protein, 10 aa, Artificial Sequence
  Description of Artificial Sequence: Synthetic epitope
NKRQLITEER

SEQ ID NO: 30272 - protein, 10 aa, Artificial Sequence
  Description of Artificial Sequence: Synthetic epitope
NKRSEGVGTS

SEQ ID NO: 30273 - protein, 10 aa, Artificial Sequence
  Description of Artificial Sequence: Synthetic epitope
NKRTDANESS

SEQ ID NO: 30274 - protein, 10 aa, Artificial Sequence
  Description of Artificial Sequence: Synthetic epitope
NKRTWQREIS

SEQ ID NO: 30275 - protein, 10 aa, Artificial Sequence
  Description of Artificial Sequence: Synthetic epitope
NKSAKKREGE

SEQ ID NO: 30276 - protein, 10 aa, Artificial Sequence
  Description of Artificial Sequence: Synthetic epitope
NKSEELEARF

SEQ ID NO: 30277 - protein, 10 aa, Artificial Sequence
  Description of Artificial Sequence: Synthetic epitope
NKSFAKSRQM

SEQ ID NO: 30278 - protein, 10 aa, Artificial Sequence
  Description of Artificial Sequence: Synthetic epitope
NKSGTTQNAN

SEQ ID NO: 30279 - protein, 10 aa, Artificial Sequence
  Description of Artificial Sequence: Synthetic epitope
NKSKELLTVE

SEQ ID NO: 30280 - protein, 10 aa, Artificial Sequence
  Description of Artificial Sequence: Synthetic epitope
NKSKFKQLRS

SEQ ID NO: 30281 - protein, 10 aa, Artificial Sequence
  Description of Artificial Sequence: Synthetic epitope
NKSLVSMSAT

SEQ ID NO: 30282 - protein, 10 aa, Artificial Sequence
  Description of Artificial Sequence: Synthetic epitope
NKSMKLVDTF

SEQ ID NO: 30283 - protein, 10 aa, Artificial Sequence
  Description of Artificial Sequence: Synthetic epitope
NKSNMAATAA

SEQ ID NO: 30284 - protein, 10 aa, Artificial Sequence
  Description of Artificial Sequence: Synthetic epitope
NKSPMQHWRN

SEQ ID NO: 30285 - protein, 10 aa, Artificial Sequence
  Description of Artificial Sequence: Synthetic epitope
NKSPMQHWRN

SEQ ID NO: 30286 - protein, 10 aa, Artificial Sequence
  Description of Artificial Sequence: Synthetic epitope
NKSQMSGVEA

SEQ ID NO: 30287 - protein, 10 aa, Artificial Sequence
  Description of Artificial Sequence: Synthetic epitope
NKSSAVTSEE

SEQ ID NO: 30288 - protein, 10 aa, Artificial Sequence
  Description of Artificial Sequence: Synthetic epitope
NKSSPTTELR

SEQ ID NO: 30289 - protein, 10 aa, Artificial Sequence
  Description of Artificial Sequence: Synthetic epitope
NKSTGKSASS

SEQ ID NO: 30290 - protein, 10 aa, Artificial Sequence
  Description of Artificial Sequence: Synthetic epitope
NKSTSSLAGN

SEQ ID NO: 30291 - protein, 10 aa, Artificial Sequence
  Description of Artificial Sequence: Synthetic epitope
NKSTSSRSLK

SEQ ID NO: 30292 - protein, 10 aa, Artificial Sequence
  Description of Artificial Sequence: Synthetic epitope
NKSVDYSRSQ

SEQ ID NO: 30293 - protein, 10 aa, Artificial Sequence
  Description of Artificial Sequence: Synthetic epitope
NKTATLLERI

SEQ ID NO: 30294 - protein, 10 aa, Artificial Sequence
  Description of Artificial Sequence: Synthetic epitope
NKTEMRNETV

SEQ ID NO: 30295 - protein, 10 aa, Artificial Sequence
  Description of Artificial Sequence: Synthetic epitope
NKTEQAGRNA

SEQ ID NO: 30296 - protein, 10 aa, Artificial Sequence
  Description of Artificial Sequence: Synthetic epitope
NKTESNLSID

SEQ ID NO: 30297 - protein, 10 aa, Artificial Sequence
  Description of Artificial Sequence: Synthetic epitope
NKTHKQGSTQ

SEQ ID NO: 30298 - protein, 10 aa, Artificial Sequence
  Description of Artificial Sequence: Synthetic epitope
NKTHKQQFNK

SEQ ID NO: 30299 - protein, 10 aa, Artificial Sequence
  Description of Artificial Sequence: Synthetic epitope
NKTKKSKDPD

SEQ ID NO: 30300 - protein, 10 aa, Artificial Sequence
  Description of Artificial Sequence: Synthetic epitope
NKTKSSQGAS

SEQ ID NO: 30301 - protein, 10 aa, Artificial Sequence
  Description of Artificial Sequence: Synthetic epitope
NKTKWKGGTL

SEQ ID NO: 30302 - protein, 10 aa, Artificial Sequence
  Description of Artificial Sequence: Synthetic epitope
NKTLAAEMQE

SEQ ID NO: 30303 - protein, 10 aa, Artificial Sequence
  Description of Artificial Sequence: Synthetic epitope
NKTSKSRSRS

SEQ ID NO: 30304 - protein, 10 aa, Artificial Sequence
  Description of Artificial Sequence: Synthetic epitope
NKTSSADTQK

SEQ ID NO: 30305 - protein, 10 aa, Artificial Sequence
  Description of Artificial Sequence: Synthetic epitope
NKTVKMVIPA

SEQ ID NO: 30306 - protein, 10 aa, Artificial Sequence
  Description of Artificial Sequence: Synthetic epitope
NKVADTEIRT

SEQ ID NO: 30307 - protein, 10 aa, Artificial Sequence
  Description of Artificial Sequence: Synthetic epitope
NKVAIVVSSL

SEQ ID NO: 30308 - protein, 10 aa, Artificial Sequence
  Description of Artificial Sequence: Synthetic epitope
NKVDPLVSLM

SEQ ID NO: 30309 - protein, 10 aa, Artificial Sequence
  Description of Artificial Sequence: Synthetic epitope
NKVMTLLDEK

SEQ ID NO: 30310 - protein, 10 aa, Artificial Sequence
  Description of Artificial Sequence: Synthetic epitope
NKVRTRGSIK

SEQ ID NO: 30311 - protein, 10 aa, Artificial Sequence
  Description of Artificial Sequence: Synthetic epitope
NKVSMSSTVQ

SEQ ID NO: 30312 - protein, 10 aa, Artificial Sequence
  Description of Artificial Sequence: Synthetic epitope
NKVSQTEEID

SEQ ID NO: 30313 - protein, 10 aa, Artificial Sequence
  Description of Artificial Sequence: Synthetic epitope
NKVSSQPEKR

SEQ ID NO: 30314 - protein, 10 aa, Artificial Sequence
  Description of Artificial Sequence: Synthetic epitope
NKVTTSGLET

SEQ ID NO: 30315 - protein, 10 aa, Artificial Sequence
  Description of Artificial Sequence: Synthetic epitope
NKVVKVTAPE

SEQ ID NO: 30316 - protein, 10 aa, Artificial Sequence
  Description of Artificial Sequence: Synthetic epitope
NKVYLSGKAV

SEQ ID NO: 30317 - protein, 10 aa, Artificial Sequence
  Description of Artificial Sequence: Synthetic epitope
NKYKMVETIT

SEQ ID NO: 30318 - protein, 10 aa, Artificial Sequence
  Description of Artificial Sequence: Synthetic epitope
NKYKQMLVNA

SEQ ID NO: 30319 - protein, 10 aa, Artificial Sequence
  Description of Artificial Sequence: Synthetic epitope
NKYLLAARLT

SEQ ID NO: 30320 - protein, 10 aa, Artificial Sequence
  Description of Artificial Sequence: Synthetic epitope
NKYSEAIRGN

SEQ ID NO: 30321 - protein, 10 aa, Artificial Sequence
  Description of Artificial Sequence: Synthetic epitope
NLAADAAQSK

SEQ ID NO: 30322 - protein, 10 aa, Artificial Sequence
  Description of Artificial Sequence: Synthetic epitope
NLAAVKFRKA

SEQ ID NO: 30323 - protein, 10 aa, Artificial Sequence
  Description of Artificial Sequence: Synthetic epitope
NLAENKFVDE

SEQ ID NO: 30324 - protein, 10 aa, Artificial Sequence
  Description of Artificial Sequence: Synthetic epitope
NLAISAIEQD

SEQ ID NO: 30325 - protein, 10 aa, Artificial Sequence
  Description of Artificial Sequence: Synthetic epitope
NLAISITGYE

SEQ ID NO: 30326 - protein, 10 aa, Artificial Sequence
  Description of Artificial Sequence: Synthetic epitope
NLAKAETKLH

SEQ ID NO: 30327 - protein, 10 aa, Artificial Sequence
  Description of Artificial Sequence: Synthetic epitope
NLAKQKAEAQ

SEQ ID NO: 30328 - protein, 10 aa, Artificial Sequence
  Description of Artificial Sequence: Synthetic epitope
NLALKLLSVT

SEQ ID NO: 30329 - protein, 10 aa, Artificial Sequence
  Description of Artificial Sequence: Synthetic epitope
NLALNSASAI

SEQ ID NO: 30330 - protein, 10 aa, Artificial Sequence
  Description of Artificial Sequence: Synthetic epitope
NLALNSASAI

SEQ ID NO: 30331 - protein, 10 aa, Artificial Sequence
  Description of Artificial Sequence: Synthetic epitope
NLALNSASAI

SEQ ID NO: 30332 - protein, 10 aa, Artificial Sequence
  Description of Artificial Sequence: Synthetic epitope
NLANAIEAAD

SEQ ID NO: 30333 - protein, 10 aa, Artificial Sequence
  Description of Artificial Sequence: Synthetic epitope
NLANKADRDQ

SEQ ID NO: 30334 - protein, 10 aa, Artificial Sequence
  Description of Artificial Sequence: Synthetic epitope
NLAQQKIISE

SEQ ID NO: 30335 - protein, 10 aa, Artificial Sequence
  Description of Artificial Sequence: Synthetic epitope
NLASQSVLEG

SEQ ID NO: 30336 - protein, 10 aa, Artificial Sequence
  Description of Artificial Sequence: Synthetic epitope
NLAYKKLKGK

SEQ ID NO: 30337 - protein, 10 aa, Artificial Sequence
  Description of Artificial Sequence: Synthetic epitope
NLDAKQKKAS

SEQ ID NO: 30338 - protein, 10 aa, Artificial Sequence
  Description of Artificial Sequence: Synthetic epitope
NLDFHDEQKR

SEQ ID NO: 30339 - protein, 10 aa, Artificial Sequence
  Description of Artificial Sequence: Synthetic epitope
NLDHSVSEVE

SEQ ID NO: 30340 - protein, 10 aa, Artificial Sequence
  Description of Artificial Sequence: Synthetic epitope
NLDNESQTTS

SEQ ID NO: 30341 - protein, 10 aa, Artificial Sequence
  Description of Artificial Sequence: Synthetic epitope
NLDQTKVEPL

SEQ ID NO: 30342 - protein, 10 aa, Artificial Sequence
  Description of Artificial Sequence: Synthetic epitope
NLDSSTIQTD

SEQ ID NO: 30343 - protein, 10 aa, Artificial Sequence
  Description of Artificial Sequence: Synthetic epitope
NLEASAVIQG

SEQ ID NO: 30344 - protein, 10 aa, Artificial Sequence
  Description of Artificial Sequence: Synthetic epitope
NLEDELVKEA

SEQ ID NO: 30345 - protein, 10 aa, Artificial Sequence
  Description of Artificial Sequence: Synthetic epitope
NLEDSLFTLQ

SEQ ID NO: 30346 - protein, 10 aa, Artificial Sequence
  Description of Artificial Sequence: Synthetic epitope
NLEEDEANIA

SEQ ID NO: 30347 - protein, 10 aa, Artificial Sequence
  Description of Artificial Sequence: Synthetic epitope
NLEEVTMKQI

SEQ ID NO: 30348 - protein, 10 aa, Artificial Sequence
  Description of Artificial Sequence: Synthetic epitope
NLEHIATSSA

SEQ ID NO: 30349 - protein, 10 aa, Artificial Sequence
  Description of Artificial Sequence: Synthetic epitope
NLELAAVRGS

SEQ ID NO: 30350 - protein, 10 aa, Artificial Sequence
  Description of Artificial Sequence: Synthetic epitope
NLELYVEQES

SEQ ID NO: 30351 - protein, 10 aa, Artificial Sequence
  Description of Artificial Sequence: Synthetic epitope
NLENLLEATK

SEQ ID NO: 30352 - protein, 10 aa, Artificial Sequence
  Description of Artificial Sequence: Synthetic epitope
NLEQAVVLEQ

SEQ ID NO: 30353 - protein, 10 aa, Artificial Sequence
  Description of Artificial Sequence: Synthetic epitope
NLESSRMYDV

SEQ ID NO: 30354 - protein, 10 aa, Artificial Sequence
  Description of Artificial Sequence: Synthetic epitope
NLETVLSQSV

SEQ ID NO: 30355 - protein, 10 aa, Artificial Sequence
  Description of Artificial Sequence: Synthetic epitope
NLEVDVVDSK

SEQ ID NO: 30356 - protein, 10 aa, Artificial Sequence
  Description of Artificial Sequence: Synthetic epitope
NLEVKSLRAL

SEQ ID NO: 30357 - protein, 10 aa, Artificial Sequence
  Description of Artificial Sequence: Synthetic epitope
NLFIATKQDY

SEQ ID NO: 30358 - protein, 10 aa, Artificial Sequence
  Description of Artificial Sequence: Synthetic epitope
NLFMKLDSVF

SEQ ID NO: 30359 - protein, 10 aa, Artificial Sequence
  Description of Artificial Sequence: Synthetic epitope
NLGHGHKHER

SEQ ID NO: 30360 - protein, 10 aa, Artificial Sequence
  Description of Artificial Sequence: Synthetic epitope
NLGKDQYPQQ

SEQ ID NO: 30361 - protein, 10 aa, Artificial Sequence
  Description of Artificial Sequence: Synthetic epitope
NLGLGSTKFA

SEQ ID NO: 30362 - protein, 10 aa, Artificial Sequence
  Description of Artificial Sequence: Synthetic epitope
NLGQSTEYRH

SEQ ID NO: 30363 - protein, 10 aa, Artificial Sequence
  Description of Artificial Sequence: Synthetic epitope
NLGVLAQKSD

SEQ ID NO: 30364 - protein, 10 aa, Artificial Sequence
  Description of Artificial Sequence: Synthetic epitope
NLHQKSSEIE

SEQ ID NO: 30365 - protein, 10 aa, Artificial Sequence
  Description of Artificial Sequence: Synthetic epitope
NLHSEISGKR

SEQ ID NO: 30366 - protein, 10 aa, Artificial Sequence
  Description of Artificial Sequence: Synthetic epitope
NLHYAVVSKR

SEQ ID NO: 30367 - protein, 10 aa, Artificial Sequence
  Description of Artificial Sequence: Synthetic epitope
NLIATAQAQN

SEQ ID NO: 30368 - protein, 10 aa, Artificial Sequence
  Description of Artificial Sequence: Synthetic epitope
NLIGVTAELV

SEQ ID NO: 30369 - protein, 10 aa, Artificial Sequence
  Description of Artificial Sequence: Synthetic epitope
NLIHSTSAMS

SEQ ID NO: 30370 - protein, 10 aa, Artificial Sequence
  Description of Artificial Sequence: Synthetic epitope
NLIKMIVKNY

SEQ ID NO: 30371 - protein, 10 aa, Artificial Sequence
  Description of Artificial Sequence: Synthetic epitope
NLISQEQLVR

SEQ ID NO: 30372 - protein, 10 aa, Artificial Sequence
  Description of Artificial Sequence: Synthetic epitope
NLISTLITNL

SEQ ID NO: 30373 - protein, 10 aa, Artificial Sequence
  Description of Artificial Sequence: Synthetic epitope
NLITSAFELV

SEQ ID NO: 30374 - protein, 10 aa, Artificial Sequence
  Description of Artificial Sequence: Synthetic epitope
NLIVMSMVEN

SEQ ID NO: 30375 - protein, 10 aa, Artificial Sequence
  Description of Artificial Sequence: Synthetic epitope
NLKASEKLDY

SEQ ID NO: 30376 - protein, 10 aa, Artificial Sequence
  Description of Artificial Sequence: Synthetic epitope
NLKASRGNDR

SEQ ID NO: 30377 - protein, 10 aa, Artificial Sequence
  Description of Artificial Sequence: Synthetic epitope
NLKATYVRPK

SEQ ID NO: 30378 - protein, 10 aa, Artificial Sequence
  Description of Artificial Sequence: Synthetic epitope
NLKDASVLPD

SEQ ID NO: 30379 - protein, 10 aa, Artificial Sequence
  Description of Artificial Sequence: Synthetic epitope
NLKIKLAQAK

SEQ ID NO: 30380 - protein, 10 aa, Artificial Sequence
  Description of Artificial Sequence: Synthetic epitope
NLKKLRARST

SEQ ID NO: 30381 - protein, 10 aa, Artificial Sequence
  Description of Artificial Sequence: Synthetic epitope
NLKLHESVKN

SEQ ID NO: 30382 - protein, 10 aa, Artificial Sequence
  Description of Artificial Sequence: Synthetic epitope
NLKMTSQDEE

SEQ ID NO: 30383 - protein, 10 aa, Artificial Sequence
  Description of Artificial Sequence: Synthetic epitope
NLKSASNIDD

SEQ ID NO: 30384 - protein, 10 aa, Artificial Sequence
  Description of Artificial Sequence: Synthetic epitope
NLLEARSIIP

SEQ ID NO: 30385 - protein, 10 aa, Artificial Sequence
  Description of Artificial Sequence: Synthetic epitope
NLLGASVQEY

SEQ ID NO: 30386 - protein, 10 aa, Artificial Sequence
  Description of Artificial Sequence: Synthetic epitope
NLLHKAHQKV

SEQ ID NO: 30387 - protein, 10 aa, Artificial Sequence
  Description of Artificial Sequence: Synthetic epitope
NLLIKASQQS

SEQ ID NO: 30388 - protein, 10 aa, Artificial Sequence
  Description of Artificial Sequence: Synthetic epitope
NLLKAAVKGS

SEQ ID NO: 30389 - protein, 10 aa, Artificial Sequence
  Description of Artificial Sequence: Synthetic epitope
NLLKLKASFN

SEQ ID NO: 30390 - protein, 10 aa, Artificial Sequence
  Description of Artificial Sequence: Synthetic epitope
NLLKSLRSQK

SEQ ID NO: 30391 - protein, 10 aa, Artificial Sequence
  Description of Artificial Sequence: Synthetic epitope
NLLKSSKIKL

SEQ ID NO: 30392 - protein, 10 aa, Artificial Sequence
  Description of Artificial Sequence: Synthetic epitope
NLLMALPRSL

SEQ ID NO: 30393 - protein, 10 aa, Artificial Sequence
  Description of Artificial Sequence: Synthetic epitope
NLLMETVGSD

SEQ ID NO: 30394 - protein, 10 aa, Artificial Sequence
  Description of Artificial Sequence: Synthetic epitope
NLLMKADSLR

SEQ ID NO: 30395 - protein, 10 aa, Artificial Sequence
  Description of Artificial Sequence: Synthetic epitope
NLLNLNIENV

SEQ ID NO: 30396 - protein, 10 aa, Artificial Sequence
  Description of Artificial Sequence: Synthetic epitope
NLLPQFGSQE

SEQ ID NO: 30397 - protein, 10 aa, Artificial Sequence
  Description of Artificial Sequence: Synthetic epitope
NLLSNAANPV

SEQ ID NO: 30398 - protein, 10 aa, Artificial Sequence
  Description of Artificial Sequence: Synthetic epitope
NLLSNSATSS

SEQ ID NO: 30399 - protein, 10 aa, Artificial Sequence
  Description of Artificial Sequence: Synthetic epitope
NLLSTATPAV

SEQ ID NO: 30400 - protein, 10 aa, Artificial Sequence
  Description of Artificial Sequence: Synthetic epitope
NLLTLIVEQI

SEQ ID NO: 30401 - protein, 10 aa, Artificial Sequence
  Description of Artificial Sequence: Synthetic epitope
NLMADYLRQI

SEQ ID NO: 30402 - protein, 10 aa, Artificial Sequence
  Description of Artificial Sequence: Synthetic epitope
NLMQKLKLTE

SEQ ID NO: 30403 - protein, 10 aa, Artificial Sequence
  Description of Artificial Sequence: Synthetic epitope
NLMRFIFRTD

SEQ ID NO: 30404 - protein, 10 aa, Artificial Sequence
  Description of Artificial Sequence: Synthetic epitope
NLMSAMLHVE

SEQ ID NO: 30405 - protein, 10 aa, Artificial Sequence
  Description of Artificial Sequence: Synthetic epitope
NLMVAVFKAA

SEQ ID NO: 30406 - protein, 10 aa, Artificial Sequence
  Description of Artificial Sequence: Synthetic epitope
NLNENQASEE

SEQ ID NO: 30407 - protein, 10 aa, Artificial Sequence
  Description of Artificial Sequence: Synthetic epitope
NLNIAIDVID

SEQ ID NO: 30408 - protein, 10 aa, Artificial Sequence
  Description of Artificial Sequence: Synthetic epitope
NLNKSKEETD

SEQ ID NO: 30409 - protein, 10 aa, Artificial Sequence
  Description of Artificial Sequence: Synthetic epitope
NLNKYSSTEE

SEQ ID NO: 30410 - protein, 10 aa, Artificial Sequence
  Description of Artificial Sequence: Synthetic epitope
NLNLVAVNTV

SEQ ID NO: 30411 - protein, 10 aa, Artificial Sequence
  Description of Artificial Sequence: Synthetic epitope
NLNNPESQSM

SEQ ID NO: 30412 - protein, 10 aa, Artificial Sequence
  Description of Artificial Sequence: Synthetic epitope
NLNSLSRTST

SEQ ID NO: 30413 - protein, 10 aa, Artificial Sequence
  Description of Artificial Sequence: Synthetic epitope
NLNSNKTESK

SEQ ID NO: 30414 - protein, 10 aa, Artificial Sequence
  Description of Artificial Sequence: Synthetic epitope
NLNTMTSVDL

SEQ ID NO: 30415 - protein, 10 aa, Artificial Sequence
  Description of Artificial Sequence: Synthetic epitope
NLPEAASYDE

SEQ ID NO: 30416 - protein, 10 aa, Artificial Sequence
  Description of Artificial Sequence: Synthetic epitope
NLPIMETFLS

SEQ ID NO: 30417 - protein, 10 aa, Artificial Sequence
  Description of Artificial Sequence: Synthetic epitope
NLPQRAKPVQ

SEQ ID NO: 30418 - protein, 10 aa, Artificial Sequence
  Description of Artificial Sequence: Synthetic epitope
NLPQSSADAA

SEQ ID NO: 30419 - protein, 10 aa, Artificial Sequence
  Description of Artificial Sequence: Synthetic epitope
NLPSLAKQGA

SEQ ID NO: 30420 - protein, 10 aa, Artificial Sequence
  Description of Artificial Sequence: Synthetic epitope
NLQDKNLMAQ

SEQ ID NO: 30421 - protein, 10 aa, Artificial Sequence
  Description of Artificial Sequence: Synthetic epitope
NLQKLQAQKQ

SEQ ID NO: 30422 - protein, 10 aa, Artificial Sequence
  Description of Artificial Sequence: Synthetic epitope
NLQKSSLSAR

SEQ ID NO: 30423 - protein, 10 aa, Artificial Sequence
  Description of Artificial Sequence: Synthetic epitope
NLQKTTMNNY

SEQ ID NO: 30424 - protein, 10 aa, Artificial Sequence
  Description of Artificial Sequence: Synthetic epitope
NLQLSAKSVG

SEQ ID NO: 30425 - protein, 10 aa, Artificial Sequence
  Description of Artificial Sequence: Synthetic epitope
NLQMAAVTMG

SEQ ID NO: 30426 - protein, 10 aa, Artificial Sequence
  Description of Artificial Sequence: Synthetic epitope
NLQMTAFFSE

SEQ ID NO: 30427 - protein, 10 aa, Artificial Sequence
  Description of Artificial Sequence: Synthetic epitope
NLQQKKSQAR

SEQ ID NO: 30428 - protein, 10 aa, Artificial Sequence
  Description of Artificial Sequence: Synthetic epitope
NLQSSLKTSK

SEQ ID NO: 30429 - protein, 10 aa, Artificial Sequence
  Description of Artificial Sequence: Synthetic epitope
NLRENQVAKP

SEQ ID NO: 30430 - protein, 10 aa, Artificial Sequence
  Description of Artificial Sequence: Synthetic epitope
NLRHESAKAD

SEQ ID NO: 30431 - protein, 10 aa, Artificial Sequence
  Description of Artificial Sequence: Synthetic epitope
NLRIMLKLNP

SEQ ID NO: 30432 - protein, 10 aa, Artificial Sequence
  Description of Artificial Sequence: Synthetic epitope
NLRKANKAVD

SEQ ID NO: 30433 - protein, 10 aa, Artificial Sequence
  Description of Artificial Sequence: Synthetic epitope
NLRKDQKKTK

SEQ ID NO: 30434 - protein, 10 aa, Artificial Sequence
  Description of Artificial Sequence: Synthetic epitope
NLRKEKSKVA

SEQ ID NO: 30435 - protein, 10 aa, Artificial Sequence
  Description of Artificial Sequence: Synthetic epitope
NLRKIALEGA

SEQ ID NO: 30436 - protein, 10 aa, Artificial Sequence
  Description of Artificial Sequence: Synthetic epitope
NLRMKAKAQQ

SEQ ID NO: 30437 - protein, 10 aa, Artificial Sequence
  Description of Artificial Sequence: Synthetic epitope
NLRNLEISQQ

SEQ ID NO: 30438 - protein, 10 aa, Artificial Sequence
  Description of Artificial Sequence: Synthetic epitope
NLRVKPQQGT

SEQ ID NO: 30439 - protein, 10 aa, Artificial Sequence
  Description of Artificial Sequence: Synthetic epitope
NLRYTQVSRQ

SEQ ID NO: 30440 - protein, 10 aa, Artificial Sequence
  Description of Artificial Sequence: Synthetic epitope
NLSASLDQNN

SEQ ID NO: 30441 - protein, 10 aa, Artificial Sequence
  Description of Artificial Sequence: Synthetic epitope
NLSEAGVAPP

SEQ ID NO: 30442 - protein, 10 aa, Artificial Sequence
  Description of Artificial Sequence: Synthetic epitope
NLSEKTSKQM

SEQ ID NO: 30443 - protein, 10 aa, Artificial Sequence
  Description of Artificial Sequence: Synthetic epitope
NLSESEMFAS

SEQ ID NO: 30444 - protein, 10 aa, Artificial Sequence
  Description of Artificial Sequence: Synthetic epitope
NLSHSKSLSA

SEQ ID NO: 30445 - protein, 10 aa, Artificial Sequence
  Description of Artificial Sequence: Synthetic epitope
NLSISANVEN

SEQ ID NO: 30446 - protein, 10 aa, Artificial Sequence
  Description of Artificial Sequence: Synthetic epitope
NLSKFLRQGL

SEQ ID NO: 30447 - protein, 10 aa, Artificial Sequence
  Description of Artificial Sequence: Synthetic epitope
NLSKSIGTSQ

SEQ ID NO: 30448 - protein, 10 aa, Artificial Sequence
  Description of Artificial Sequence: Synthetic epitope
NLSLRTAVHK

SEQ ID NO: 30449 - protein, 10 aa, Artificial Sequence
  Description of Artificial Sequence: Synthetic epitope
NLSLSLSQGV

SEQ ID NO: 30450 - protein, 10 aa, Artificial Sequence
  Description of Artificial Sequence: Synthetic epitope
NLSNSNEVEM

SEQ ID NO: 30451 - protein, 10 aa, Artificial Sequence
  Description of Artificial Sequence: Synthetic epitope
NLSPSSHANN

SEQ ID NO: 30452 - protein, 10 aa, Artificial Sequence
  Description of Artificial Sequence: Synthetic epitope
NLSQASTSDE

SEQ ID NO: 30453 - protein, 10 aa, Artificial Sequence
  Description of Artificial Sequence: Synthetic epitope
NLSQTLANKT

SEQ ID NO: 30454 - protein, 10 aa, Artificial Sequence
  Description of Artificial Sequence: Synthetic epitope
NLSQVEGKPS

SEQ ID NO: 30455 - protein, 10 aa, Artificial Sequence
  Description of Artificial Sequence: Synthetic epitope
NLSSDSSALG

SEQ ID NO: 30456 - protein, 10 aa, Artificial Sequence
  Description of Artificial Sequence: Synthetic epitope
NLSSEEVARP

SEQ ID NO: 30457 - protein, 10 aa, Artificial Sequence
  Description of Artificial Sequence: Synthetic epitope
NLSSKRNTKE

SEQ ID NO: 30458 - protein, 10 aa, Artificial Sequence
  Description of Artificial Sequence: Synthetic epitope
NLSSTAEWVL

SEQ ID NO: 30459 - protein, 10 aa, Artificial Sequence
  Description of Artificial Sequence: Synthetic epitope
NLSTLITTQE

SEQ ID NO: 30460 - protein, 10 aa, Artificial Sequence
  Description of Artificial Sequence: Synthetic epitope
NLTALATSKP

SEQ ID NO: 30461 - protein, 10 aa, Artificial Sequence
  Description of Artificial Sequence: Synthetic epitope
NLTANQLSQS

SEQ ID NO: 30462 - protein, 10 aa, Artificial Sequence
  Description of Artificial Sequence: Synthetic epitope
NLTATLVLEK

SEQ ID NO: 30463 - protein, 10 aa, Artificial Sequence
  Description of Artificial Sequence: Synthetic epitope
NLTAVKLESI

SEQ ID NO: 30464 - protein, 10 aa, Artificial Sequence
  Description of Artificial Sequence: Synthetic epitope
NLTDEALRLK

SEQ ID NO: 30465 - protein, 10 aa, Artificial Sequence
  Description of Artificial Sequence: Synthetic epitope
NLTDTVQNKQ

SEQ ID NO: 30466 - protein, 10 aa, Artificial Sequence
  Description of Artificial Sequence: Synthetic epitope
NLTEALSLYE

SEQ ID NO: 30467 - protein, 10 aa, Artificial Sequence
  Description of Artificial Sequence: Synthetic epitope
NLTEDYMVFE

SEQ ID NO: 30468 - protein, 10 aa, Artificial Sequence
  Description of Artificial Sequence: Synthetic epitope
NLTEPAKLEV

SEQ ID NO: 30469 - protein, 10 aa, Artificial Sequence
  Description of Artificial Sequence: Synthetic epitope
NLTESVVLTV

SEQ ID NO: 30470 - protein, 10 aa, Artificial Sequence
  Description of Artificial Sequence: Synthetic epitope
NLTILQEQSQ

SEQ ID NO: 30471 - protein, 10 aa, Artificial Sequence
  Description of Artificial Sequence: Synthetic epitope
NLTKSERYSS

SEQ ID NO: 30472 - protein, 10 aa, Artificial Sequence
  Description of Artificial Sequence: Synthetic epitope
NLTKTIQQDE

SEQ ID NO: 30473 - protein, 10 aa, Artificial Sequence
  Description of Artificial Sequence: Synthetic epitope
NLTLTSGSKH

SEQ ID NO: 30474 - protein, 10 aa, Artificial Sequence
  Description of Artificial Sequence: Synthetic epitope
NLTNLASNVK

SEQ ID NO: 30475 - protein, 10 aa, Artificial Sequence
  Description of Artificial Sequence: Synthetic epitope
NLTNVTDIIR

SEQ ID NO: 30476 - protein, 10 aa, Artificial Sequence
  Description of Artificial Sequence: Synthetic epitope
NLTQAAREVN

SEQ ID NO: 30477 - protein, 10 aa, Artificial Sequence
  Description of Artificial Sequence: Synthetic epitope
NLTQILSATM

SEQ ID NO: 30478 - protein, 10 aa, Artificial Sequence
  Description of Artificial Sequence: Synthetic epitope
NLTSLKSSLQ

SEQ ID NO: 30479 - protein, 10 aa, Artificial Sequence
  Description of Artificial Sequence: Synthetic epitope
NLTSLVSREQ

SEQ ID NO: 30480 - protein, 10 aa, Artificial Sequence
  Description of Artificial Sequence: Synthetic epitope
NLTSSKFEEF

SEQ ID NO: 30481 - protein, 10 aa, Artificial Sequence
  Description of Artificial Sequence: Synthetic epitope
NLTVSNTRTV

SEQ ID NO: 30482 - protein, 10 aa, Artificial Sequence
  Description of Artificial Sequence: Synthetic epitope
NLVAEERLSS

SEQ ID NO: 30483 - protein, 10 aa, Artificial Sequence
  Description of Artificial Sequence: Synthetic epitope
NLVKENVSGQ

SEQ ID NO: 30484 - protein, 10 aa, Artificial Sequence
  Description of Artificial Sequence: Synthetic epitope
NLVKETMPKK

SEQ ID NO: 30485 - protein, 10 aa, Artificial Sequence
  Description of Artificial Sequence: Synthetic epitope
NLVLIRMKPD

SEQ ID NO: 30486 - protein, 10 aa, Artificial Sequence
  Description of Artificial Sequence: Synthetic epitope
NLVLTSQNAI

SEQ ID NO: 30487 - protein, 10 aa, Artificial Sequence
  Description of Artificial Sequence: Synthetic epitope
NLVSTSSMNT

SEQ ID NO: 30488 - protein, 10 aa, Artificial Sequence
  Description of Artificial Sequence: Synthetic epitope
NLWKFIKIRS

SEQ ID NO: 30489 - protein, 10 aa, Artificial Sequence
  Description of Artificial Sequence: Synthetic epitope
NLYAEENAIE

SEQ ID NO: 30490 - protein, 10 aa, Artificial Sequence
  Description of Artificial Sequence: Synthetic epitope
NLYKNNHSES

SEQ ID NO: 30491 - protein, 10 aa, Artificial Sequence
  Description of Artificial Sequence: Synthetic epitope
NLYNNILSDK

SEQ ID NO: 30492 - protein, 10 aa, Artificial Sequence
  Description of Artificial Sequence: Synthetic epitope
NMAALLRKEE

SEQ ID NO: 30493 - protein, 10 aa, Artificial Sequence
  Description of Artificial Sequence: Synthetic epitope
NMAPNSLSAP

SEQ ID NO: 30494 - protein, 10 aa, Artificial Sequence
  Description of Artificial Sequence: Synthetic epitope
NMDKQRQKRL

SEQ ID NO: 30495 - protein, 10 aa, Artificial Sequence
  Description of Artificial Sequence: Synthetic epitope
NMDNFQYVGA

SEQ ID NO: 30496 - protein, 10 aa, Artificial Sequence
  Description of Artificial Sequence: Synthetic epitope
NMDQAMVKSE

SEQ ID NO: 30497 - protein, 10 aa, Artificial Sequence
  Description of Artificial Sequence: Synthetic epitope
NMDRVNVEEF

SEQ ID NO: 30498 - protein, 10 aa, Artificial Sequence
  Description of Artificial Sequence: Synthetic epitope
NMDVESRTMA

SEQ ID NO: 30499 - protein, 10 aa, Artificial Sequence
  Description of Artificial Sequence: Synthetic epitope
NMEASSTLAK

SEQ ID NO: 30500 - protein, 10 aa, Artificial Sequence
  Description of Artificial Sequence: Synthetic epitope
NMEILEEQML

SEQ ID NO: 30501 - protein, 10 aa, Artificial Sequence
  Description of Artificial Sequence: Synthetic epitope
NMEKKRSNTE

SEQ ID NO: 30502 - protein, 10 aa, Artificial Sequence
  Description of Artificial Sequence: Synthetic epitope
NMERTTIKKQ

SEQ ID NO: 30503 - protein, 10 aa, Artificial Sequence
  Description of Artificial Sequence: Synthetic epitope
NMGMALQQRA

SEQ ID NO: 30504 - protein, 10 aa, Artificial Sequence
  Description of Artificial Sequence: Synthetic epitope
NMGSQGIQET

SEQ ID NO: 30505 - protein, 10 aa, Artificial Sequence
  Description of Artificial Sequence: Synthetic epitope
NMIGQDDRNM

SEQ ID NO: 30506 - protein, 10 aa, Artificial Sequence
  Description of Artificial Sequence: Synthetic epitope
NMIVKRLNQL

SEQ ID NO: 30507 - protein, 10 aa, Artificial Sequence
  Description of Artificial Sequence: Synthetic epitope
NMKAKKIMKG

SEQ ID NO: 30508 - protein, 10 aa, Artificial Sequence
  Description of Artificial Sequence: Synthetic epitope
NMKAQALKLA

SEQ ID NO: 30509 - protein, 10 aa, Artificial Sequence
  Description of Artificial Sequence: Synthetic epitope
NMKDMKGGQD

SEQ ID NO: 30510 - protein, 10 aa, Artificial Sequence
  Description of Artificial Sequence: Synthetic epitope
NMKDNKNAKY

SEQ ID NO: 30511 - protein, 10 aa, Artificial Sequence
  Description of Artificial Sequence: Synthetic epitope
NMKEMEFKVK

SEQ ID NO: 30512 - protein, 10 aa, Artificial Sequence
  Description of Artificial Sequence: Synthetic epitope
NMKFKLKQRE

SEQ ID NO: 30513 - protein, 10 aa, Artificial Sequence
  Description of Artificial Sequence: Synthetic epitope
NMKIPPFISK

SEQ ID NO: 30514 - protein, 10 aa, Artificial Sequence
  Description of Artificial Sequence: Synthetic epitope
NMKLWTIHEL

SEQ ID NO: 30515 - protein, 10 aa, Artificial Sequence
  Description of Artificial Sequence: Synthetic epitope
NMKSMKISDE

SEQ ID NO: 30516 - protein, 10 aa, Artificial Sequence
  Description of Artificial Sequence: Synthetic epitope
NMKVRQAIPV

SEQ ID NO: 30517 - protein, 10 aa, Artificial Sequence
  Description of Artificial Sequence: Synthetic epitope
NMKYWEKNQS

SEQ ID NO: 30518 - protein, 10 aa, Artificial Sequence
  Description of Artificial Sequence: Synthetic epitope
NMLAAVVTKK

SEQ ID NO: 30519 - protein, 10 aa, Artificial Sequence
  Description of Artificial Sequence: Synthetic epitope
NMLDEKLIKF

SEQ ID NO: 30520 - protein, 10 aa, Artificial Sequence
  Description of Artificial Sequence: Synthetic epitope
NMLGELRTSM

SEQ ID NO: 30521 - protein, 10 aa, Artificial Sequence
  Description of Artificial Sequence: Synthetic epitope
NMLIQSLVSI

SEQ ID NO: 30522 - protein, 10 aa, Artificial Sequence
  Description of Artificial Sequence: Synthetic epitope
NMLLKSLQMD

SEQ ID NO: 30523 - protein, 10 aa, Artificial Sequence
  Description of Artificial Sequence: Synthetic epitope
NMLNKIFGES

SEQ ID NO: 30524 - protein, 10 aa, Artificial Sequence
  Description of Artificial Sequence: Synthetic epitope
NMLPTNRKAN

SEQ ID NO: 30525 - protein, 10 aa, Artificial Sequence
  Description of Artificial Sequence: Synthetic epitope
NMLSEQQSTK

SEQ ID NO: 30526 - protein, 10 aa, Artificial Sequence
  Description of Artificial Sequence: Synthetic epitope
NMMNALDQLP

SEQ ID NO: 30527 - protein, 10 aa, Artificial Sequence
  Description of Artificial Sequence: Synthetic epitope
NMMSKLSSED

SEQ ID NO: 30528 - protein, 10 aa, Artificial Sequence
  Description of Artificial Sequence: Synthetic epitope
NMNIKSLLNL

SEQ ID NO: 30529 - protein, 10 aa, Artificial Sequence
  Description of Artificial Sequence: Synthetic epitope
NMNSTKLSAD

SEQ ID NO: 30530 - protein, 10 aa, Artificial Sequence
  Description of Artificial Sequence: Synthetic epitope
NMNTIKGTQN

SEQ ID NO: 30531 - protein, 10 aa, Artificial Sequence
  Description of Artificial Sequence: Synthetic epitope
NMPMDMREFV

SEQ ID NO: 30532 - protein, 10 aa, Artificial Sequence
  Description of Artificial Sequence: Synthetic epitope
NMQKARLQTQ

SEQ ID NO: 30533 - protein, 10 aa, Artificial Sequence
  Description of Artificial Sequence: Synthetic epitope
NMQVDQFESE

SEQ ID NO: 30534 - protein, 10 aa, Artificial Sequence
  Description of Artificial Sequence: Synthetic epitope
NMRDAARLEE

SEQ ID NO: 30535 - protein, 10 aa, Artificial Sequence
  Description of Artificial Sequence: Synthetic epitope
NMSGHVSMKY

SEQ ID NO: 30536 - protein, 10 aa, Artificial Sequence
  Description of Artificial Sequence: Synthetic epitope
NMSVQALQSL

SEQ ID NO: 30537 - protein, 10 aa, Artificial Sequence
  Description of Artificial Sequence: Synthetic epitope
NMTAKQLKLL

SEQ ID NO: 30538 - protein, 10 aa, Artificial Sequence
  Description of Artificial Sequence: Synthetic epitope
NMTPTVEQGE

SEQ ID NO: 30539 - protein, 10 aa, Artificial Sequence
  Description of Artificial Sequence: Synthetic epitope
NMVANLGELA

SEQ ID NO: 30540 - protein, 10 aa, Artificial Sequence
  Description of Artificial Sequence: Synthetic epitope
NMVDDKREGV

SEQ ID NO: 30541 - protein, 10 aa, Artificial Sequence
  Description of Artificial Sequence: Synthetic epitope
NMVHERVSIR

SEQ ID NO: 30542 - protein, 10 aa, Artificial Sequence
  Description of Artificial Sequence: Synthetic epitope
NMVLKLANQK

SEQ ID NO: 30543 - protein, 10 aa, Artificial Sequence
  Description of Artificial Sequence: Synthetic epitope
NMVTVAMVAG

SEQ ID NO: 30544 - protein, 10 aa, Artificial Sequence
  Description of Artificial Sequence: Synthetic epitope
NMWDFMPVDQ

SEQ ID NO: 30545 - protein, 10 aa, Artificial Sequence
  Description of Artificial Sequence: Synthetic epitope
NMWRTTYKLI

SEQ ID NO: 30546 - protein, 10 aa, Artificial Sequence
  Description of Artificial Sequence: Synthetic epitope
NMYEEMETLA

SEQ ID NO: 30547 - protein, 10 aa, Artificial Sequence
  Description of Artificial Sequence: Synthetic epitope
NMYHRIRHSE

SEQ ID NO: 30548 - protein, 10 aa, Artificial Sequence
  Description of Artificial Sequence: Synthetic epitope
NNAAPSFQFI

SEQ ID NO: 30549 - protein, 10 aa, Artificial Sequence
  Description of Artificial Sequence: Synthetic epitope
NNADSVQAKV

SEQ ID NO: 30550 - protein, 10 aa, Artificial Sequence
  Description of Artificial Sequence: Synthetic epitope
NNAEKRGKRQ

SEQ ID NO: 30551 - protein, 10 aa, Artificial Sequence
  Description of Artificial Sequence: Synthetic epitope
NNAELLKQIV

SEQ ID NO: 30552 - protein, 10 aa, Artificial Sequence
  Description of Artificial Sequence: Synthetic epitope
NNAEVNNDGQ

SEQ ID NO: 30553 - protein, 10 aa, Artificial Sequence
  Description of Artificial Sequence: Synthetic epitope
NNAKNHSPKQ

SEQ ID NO: 30554 - protein, 10 aa, Artificial Sequence
  Description of Artificial Sequence: Synthetic epitope
NNALITILPM

SEQ ID NO: 30555 - protein, 10 aa, Artificial Sequence
  Description of Artificial Sequence: Synthetic epitope
NNANHDETSS

SEQ ID NO: 30556 - protein, 10 aa, Artificial Sequence
  Description of Artificial Sequence: Synthetic epitope
NNARQPWHNA

SEQ ID NO: 30557 - protein, 10 aa, Artificial Sequence
  Description of Artificial Sequence: Synthetic epitope
NNATKTFREF

SEQ ID NO: 30558 - protein, 10 aa, Artificial Sequence
  Description of Artificial Sequence: Synthetic epitope
NNAVTKMAQS

SEQ ID NO: 30559 - protein, 10 aa, Artificial Sequence
  Description of Artificial Sequence: Synthetic epitope
NNDEGLINKK

SEQ ID NO: 30560 - protein, 10 aa, Artificial Sequence
  Description of Artificial Sequence: Synthetic epitope
NNDIFLPVKQ

SEQ ID NO: 30561 - protein, 10 aa, Artificial Sequence
  Description of Artificial Sequence: Synthetic epitope
NNDIIQDNNG

SEQ ID NO: 30562 - protein, 10 aa, Artificial Sequence
  Description of Artificial Sequence: Synthetic epitope
NNDKSISVQE

SEQ ID NO: 30563 - protein, 10 aa, Artificial Sequence
  Description of Artificial Sequence: Synthetic epitope
NNDKTTLKHD

SEQ ID NO: 30564 - protein, 10 aa, Artificial Sequence
  Description of Artificial Sequence: Synthetic epitope
NNDPTTQVLS

SEQ ID NO: 30565 - protein, 10 aa, Artificial Sequence
  Description of Artificial Sequence: Synthetic epitope
NNDYMNKWAG

SEQ ID NO: 30566 - protein, 10 aa, Artificial Sequence
  Description of Artificial Sequence: Synthetic epitope
NNEDTSHAAT

SEQ ID NO: 30567 - protein, 10 aa, Artificial Sequence
  Description of Artificial Sequence: Synthetic epitope
NNEDVNLDKV

SEQ ID NO: 30568 - protein, 10 aa, Artificial Sequence
  Description of Artificial Sequence: Synthetic epitope
NNEEAEDYDD

SEQ ID NO: 30569 - protein, 10 aa, Artificial Sequence
  Description of Artificial Sequence: Synthetic epitope
NNEKFIGDEK

SEQ ID NO: 30570 - protein, 10 aa, Artificial Sequence
  Description of Artificial Sequence: Synthetic epitope
NNEKLSLKFR

SEQ ID NO: 30571 - protein, 10 aa, Artificial Sequence
  Description of Artificial Sequence: Synthetic epitope
NNELDTSLES

SEQ ID NO: 30572 - protein, 10 aa, Artificial Sequence
  Description of Artificial Sequence: Synthetic epitope
NNELLKQKRQ

SEQ ID NO: 30573 - protein, 10 aa, Artificial Sequence
  Description of Artificial Sequence: Synthetic epitope
NNEQHFTEVP

SEQ ID NO: 30574 - protein, 10 aa, Artificial Sequence
  Description of Artificial Sequence: Synthetic epitope
NNEQILTEVP

SEQ ID NO: 30575 - protein, 10 aa, Artificial Sequence
  Description of Artificial Sequence: Synthetic epitope
NNEQLLVNQQ

SEQ ID NO: 30576 - protein, 10 aa, Artificial Sequence
  Description of Artificial Sequence: Synthetic epitope
NNEQSSGIIM

SEQ ID NO: 30577 - protein, 10 aa, Artificial Sequence
  Description of Artificial Sequence: Synthetic epitope
NNETALASGD

SEQ ID NO: 30578 - protein, 10 aa, Artificial Sequence
  Description of Artificial Sequence: Synthetic epitope
NNFETSDTEE

SEQ ID NO: 30579 - protein, 10 aa, Artificial Sequence
  Description of Artificial Sequence: Synthetic epitope
NNFFVEKNPT

SEQ ID NO: 30580 - protein, 10 aa, Artificial Sequence
  Description of Artificial Sequence: Synthetic epitope
NNFKIKNKIK

SEQ ID NO: 30581 - protein, 10 aa, Artificial Sequence
  Description of Artificial Sequence: Synthetic epitope
NNFKRNASSK

SEQ ID NO: 30582 - protein, 10 aa, Artificial Sequence
  Description of Artificial Sequence: Synthetic epitope
NNFRAEQPHQ

SEQ ID NO: 30583 - protein, 10 aa, Artificial Sequence
  Description of Artificial Sequence: Synthetic epitope
NNFRQQMENY

SEQ ID NO: 30584 - protein, 10 aa, Artificial Sequence
  Description of Artificial Sequence: Synthetic epitope
NNGFNSGSGS

SEQ ID NO: 30585 - protein, 10 aa, Artificial Sequence
  Description of Artificial Sequence: Synthetic epitope
NNGFVHNEDI

SEQ ID NO: 30586 - protein, 10 aa, Artificial Sequence
  Description of Artificial Sequence: Synthetic epitope
NNGYKSMQKK

SEQ ID NO: 30587 - protein, 10 aa, Artificial Sequence
  Description of Artificial Sequence: Synthetic epitope
NNHLVQSAQT

SEQ ID NO: 30588 - protein, 10 aa, Artificial Sequence
  Description of Artificial Sequence: Synthetic epitope
NNHMISQADD

SEQ ID NO: 30589 - protein, 10 aa, Artificial Sequence
  Description of Artificial Sequence: Synthetic epitope
NNHNSRILKK

SEQ ID NO: 30590 - protein, 10 aa, Artificial Sequence
  Description of Artificial Sequence: Synthetic epitope
NNHQTELEVP

SEQ ID NO: 30591 - protein, 10 aa, Artificial Sequence
  Description of Artificial Sequence: Synthetic epitope
NNHSDRLRRN

SEQ ID NO: 30592 - protein, 10 aa, Artificial Sequence
  Description of Artificial Sequence: Synthetic epitope
NNHSHQTMEL

SEQ ID NO: 30593 - protein, 10 aa, Artificial Sequence
  Description of Artificial Sequence: Synthetic epitope
NNIDAAIENI

SEQ ID NO: 30594 - protein, 10 aa, Artificial Sequence
  Description of Artificial Sequence: Synthetic epitope
NNIIQTWRQH

SEQ ID NO: 30595 - protein, 10 aa, Artificial Sequence
  Description of Artificial Sequence: Synthetic epitope
NNIKTGSSPN

SEQ ID NO: 30596 - protein, 10 aa, Artificial Sequence
  Description of Artificial Sequence: Synthetic epitope
NNIQDVKTQS

SEQ ID NO: 30597 - protein, 10 aa, Artificial Sequence
  Description of Artificial Sequence: Synthetic epitope
NNIQQVFQKF

SEQ ID NO: 30598 - protein, 10 aa, Artificial Sequence
  Description of Artificial Sequence: Synthetic epitope
NNIVKTMSKE

SEQ ID NO: 30599 - protein, 10 aa, Artificial Sequence
  Description of Artificial Sequence: Synthetic epitope
NNIVSTRIYE

SEQ ID NO: 30600 - protein, 10 aa, Artificial Sequence
  Description of Artificial Sequence: Synthetic epitope
NNKAIRRLLH

SEQ ID NO: 30601 - protein, 10 aa, Artificial Sequence
  Description of Artificial Sequence: Synthetic epitope
NNKIGQQVII

SEQ ID NO: 30602 - protein, 10 aa, Artificial Sequence
  Description of Artificial Sequence: Synthetic epitope
NNKISSLSNS

SEQ ID NO: 30603 - protein, 10 aa, Artificial Sequence
  Description of Artificial Sequence: Synthetic epitope
NNKKTNKNKS

SEQ ID NO: 30604 - protein, 10 aa, Artificial Sequence
  Description of Artificial Sequence: Synthetic epitope
NNKKTSKNKS

SEQ ID NO: 30605 - protein, 10 aa, Artificial Sequence
  Description of Artificial Sequence: Synthetic epitope
NNKLKENENM

SEQ ID NO: 30606 - protein, 10 aa, Artificial Sequence
  Description of Artificial Sequence: Synthetic epitope
NNKLMLSSNQ

SEQ ID NO: 30607 - protein, 10 aa, Artificial Sequence
  Description of Artificial Sequence: Synthetic epitope
NNKLSLSNAI

SEQ ID NO: 30608 - protein, 10 aa, Artificial Sequence
  Description of Artificial Sequence: Synthetic epitope
NNKMPLSTHR

SEQ ID NO: 30609 - protein, 10 aa, Artificial Sequence
  Description of Artificial Sequence: Synthetic epitope
NNKMVKTAGL

SEQ ID NO: 30610 - protein, 10 aa, Artificial Sequence
  Description of Artificial Sequence: Synthetic epitope
NNKPVSLGQA

SEQ ID NO: 30611 - protein, 10 aa, Artificial Sequence
  Description of Artificial Sequence: Synthetic epitope
NNKQYMFPET

SEQ ID NO: 30612 - protein, 10 aa, Artificial Sequence
  Description of Artificial Sequence: Synthetic epitope
NNKTERSTAP

SEQ ID NO: 30613 - protein, 10 aa, Artificial Sequence
  Description of Artificial Sequence: Synthetic epitope
NNKTSITSDI

SEQ ID NO: 30614 - protein, 10 aa, Artificial Sequence
  Description of Artificial Sequence: Synthetic epitope
NNKVILLKKE

SEQ ID NO: 30615 - protein, 10 aa, Artificial Sequence
  Description of Artificial Sequence: Synthetic epitope
NNKVSKSRKK

SEQ ID NO: 30616 - protein, 10 aa, Artificial Sequence
  Description of Artificial Sequence: Synthetic epitope
NNKVVINSNI

SEQ ID NO: 30617 - protein, 10 aa, Artificial Sequence
  Description of Artificial Sequence: Synthetic epitope
NNLISKITLS

SEQ ID NO: 30618 - protein, 10 aa, Artificial Sequence
  Description of Artificial Sequence: Synthetic epitope
NNLKLKLEMD

SEQ ID NO: 30619 - protein, 10 aa, Artificial Sequence
  Description of Artificial Sequence: Synthetic epitope
NNLKVQERQN

SEQ ID NO: 30620 - protein, 10 aa, Artificial Sequence
  Description of Artificial Sequence: Synthetic epitope
NNLMNQIRSQ

SEQ ID NO: 30621 - protein, 10 aa, Artificial Sequence
  Description of Artificial Sequence: Synthetic epitope
NNLNLTQVQQ

SEQ ID NO: 30622 - protein, 10 aa, Artificial Sequence
  Description of Artificial Sequence: Synthetic epitope
NNLPTKDLLS

SEQ ID NO: 30623 - protein, 10 aa, Artificial Sequence
  Description of Artificial Sequence: Synthetic epitope
NNLQLSSKSV

SEQ ID NO: 30624 - protein, 10 aa, Artificial Sequence
  Description of Artificial Sequence: Synthetic epitope
NNLSTVEVTS

SEQ ID NO: 30625 - protein, 10 aa, Artificial Sequence
  Description of Artificial Sequence: Synthetic epitope
NNLSVSNSAS

SEQ ID NO: 30626 - protein, 10 aa, Artificial Sequence
  Description of Artificial Sequence: Synthetic epitope
NNLTKVLQQP

SEQ ID NO: 30627 - protein, 10 aa, Artificial Sequence
  Description of Artificial Sequence: Synthetic epitope
NNLTTSKSGS

SEQ ID NO: 30628 - protein, 10 aa, Artificial Sequence
  Description of Artificial Sequence: Synthetic epitope
NNLVMNLEFS

SEQ ID NO: 30629 - protein, 10 aa, Artificial Sequence
  Description of Artificial Sequence: Synthetic epitope
NNLVYVVTNQ

SEQ ID NO: 30630 - protein, 10 aa, Artificial Sequence
  Description of Artificial Sequence: Synthetic epitope
NNMIVIGLYF

SEQ ID NO: 30631 - protein, 10 aa, Artificial Sequence
  Description of Artificial Sequence: Synthetic epitope
NNMLKQLSSQ

SEQ ID NO: 30632 - protein, 10 aa, Artificial Sequence
  Description of Artificial Sequence: Synthetic epitope
NNMNAAVSTV

SEQ ID NO: 30633 - protein, 10 aa, Artificial Sequence
  Description of Artificial Sequence: Synthetic epitope
NNMSYRNAGT

SEQ ID NO: 30634 - protein, 10 aa, Artificial Sequence
  Description of Artificial Sequence: Synthetic epitope
NNPSEIIQST

SEQ ID NO: 30635 - protein, 10 aa, Artificial Sequence
  Description of Artificial Sequence: Synthetic epitope
NNPSVVSSKI

SEQ ID NO: 30636 - protein, 10 aa, Artificial Sequence
  Description of Artificial Sequence: Synthetic epitope
NNQAMKATKE

SEQ ID NO: 30637 - protein, 10 aa, Artificial Sequence
  Description of Artificial Sequence: Synthetic epitope
NNQASSAPTP

SEQ ID NO: 30638 - protein, 10 aa, Artificial Sequence
  Description of Artificial Sequence: Synthetic epitope
NNQIEMITGL

SEQ ID NO: 30639 - protein, 10 aa, Artificial Sequence
  Description of Artificial Sequence: Synthetic epitope
NNQIIKGKQK

SEQ ID NO: 30640 - protein, 10 aa, Artificial Sequence
  Description of Artificial Sequence: Synthetic epitope
NNQLRMLTQG

SEQ ID NO: 30641 - protein, 10 aa, Artificial Sequence
  Description of Artificial Sequence: Synthetic epitope
NNQNSSQKPF

SEQ ID NO: 30642 - protein, 10 aa, Artificial Sequence
  Description of Artificial Sequence: Synthetic epitope
NNQQSKKIMV

SEQ ID NO: 30643 - protein, 10 aa, Artificial Sequence
  Description of Artificial Sequence: Synthetic epitope
NNQRSNKEHE

SEQ ID NO: 30644 - protein, 10 aa, Artificial Sequence
  Description of Artificial Sequence: Synthetic epitope
NNQSLLVSPR

SEQ ID NO: 30645 - protein, 10 aa, Artificial Sequence
  Description of Artificial Sequence: Synthetic epitope
NNRDSAVASE

SEQ ID NO: 30646 - protein, 10 aa, Artificial Sequence
  Description of Artificial Sequence: Synthetic epitope
NNRFQGSRTN

SEQ ID NO: 30647 - protein, 10 aa, Artificial Sequence
  Description of Artificial Sequence: Synthetic epitope
NNRLKEAIST

SEQ ID NO: 30648 - protein, 10 aa, Artificial Sequence
  Description of Artificial Sequence: Synthetic epitope
NNRNQEFVSS

SEQ ID NO: 30649 - protein, 10 aa, Artificial Sequence
  Description of Artificial Sequence: Synthetic epitope
NNRQEIQASE

SEQ ID NO: 30650 - protein, 10 aa, Artificial Sequence
  Description of Artificial Sequence: Synthetic epitope
NNRSLIFQHK

SEQ ID NO: 30651 - protein, 10 aa, Artificial Sequence
  Description of Artificial Sequence: Synthetic epitope
NNRTIEPEAL

SEQ ID NO: 30652 - protein, 10 aa, Artificial Sequence
  Description of Artificial Sequence: Synthetic epitope
NNSGLASEKD

SEQ ID NO: 30653 - protein, 10 aa, Artificial Sequence
  Description of Artificial Sequence: Synthetic epitope
NNSKNKTLVT

SEQ ID NO: 30654 - protein, 10 aa, Artificial Sequence
  Description of Artificial Sequence: Synthetic epitope
NNSKVKTASK

SEQ ID NO: 30655 - protein, 10 aa, Artificial Sequence
  Description of Artificial Sequence: Synthetic epitope
NNSLSMVQLL

SEQ ID NO: 30656 - protein, 10 aa, Artificial Sequence
  Description of Artificial Sequence: Synthetic epitope
NNSLSNLAPG

SEQ ID NO: 30657 - protein, 10 aa, Artificial Sequence
  Description of Artificial Sequence: Synthetic epitope
NNSQKKSRLV

SEQ ID NO: 30658 - protein, 10 aa, Artificial Sequence
  Description of Artificial Sequence: Synthetic epitope
NNSRTVASTA

SEQ ID NO: 30659 - protein, 10 aa, Artificial Sequence
  Description of Artificial Sequence: Synthetic epitope
NNSRTVASTA

SEQ ID NO: 30660 - protein, 10 aa, Artificial Sequence
  Description of Artificial Sequence: Synthetic epitope
NNSSAFTALS

SEQ ID NO: 30661 - protein, 10 aa, Artificial Sequence
  Description of Artificial Sequence: Synthetic epitope
NNSSFEKGEQ

SEQ ID NO: 30662 - protein, 10 aa, Artificial Sequence
  Description of Artificial Sequence: Synthetic epitope
NNSSGEQLSK

SEQ ID NO: 30663 - protein, 10 aa, Artificial Sequence
  Description of Artificial Sequence: Synthetic epitope
NNSSGMVDAR

SEQ ID NO: 30664 - protein, 10 aa, Artificial Sequence
  Description of Artificial Sequence: Synthetic epitope
NNSSMLSQHV

SEQ ID NO: 30665 - protein, 10 aa, Artificial Sequence
  Description of Artificial Sequence: Synthetic epitope
NNSTASSNNA

SEQ ID NO: 30666 - protein, 10 aa, Artificial Sequence
  Description of Artificial Sequence: Synthetic epitope
NNSTLINKIN

SEQ ID NO: 30667 - protein, 10 aa, Artificial Sequence
  Description of Artificial Sequence: Synthetic epitope
NNSTMKIDHF

SEQ ID NO: 30668 - protein, 10 aa, Artificial Sequence
  Description of Artificial Sequence: Synthetic epitope
NNSVAKPIQK

SEQ ID NO: 30669 - protein, 10 aa, Artificial Sequence
  Description of Artificial Sequence: Synthetic epitope
NNSVIVQAVR

SEQ ID NO: 30670 - protein, 10 aa, Artificial Sequence
  Description of Artificial Sequence: Synthetic epitope
NNTDNQGIKS

SEQ ID NO: 30671 - protein, 10 aa, Artificial Sequence
  Description of Artificial Sequence: Synthetic epitope
NNTDTLYEVV

SEQ ID NO: 30672 - protein, 10 aa, Artificial Sequence
  Description of Artificial Sequence: Synthetic epitope
NNTLNNAMPV

SEQ ID NO: 30673 - protein, 10 aa, Artificial Sequence
  Description of Artificial Sequence: Synthetic epitope
NNTLSSQISR

SEQ ID NO: 30674 - protein, 10 aa, Artificial Sequence
  Description of Artificial Sequence: Synthetic epitope
NNTNITKVAI

SEQ ID NO: 30675 - protein, 10 aa, Artificial Sequence
  Description of Artificial Sequence: Synthetic epitope
NNTQIQVVSA

SEQ ID NO: 30676 - protein, 10 aa, Artificial Sequence
  Description of Artificial Sequence: Synthetic epitope
NNTRLESRTQ

SEQ ID NO: 30677 - protein, 10 aa, Artificial Sequence
  Description of Artificial Sequence: Synthetic epitope
NNTSLAELEK

SEQ ID NO: 30678 - protein, 10 aa, Artificial Sequence
  Description of Artificial Sequence: Synthetic epitope
NNTSQMSHKK

SEQ ID NO: 30679 - protein, 10 aa, Artificial Sequence
  Description of Artificial Sequence: Synthetic epitope
NNTSVMMFKK

SEQ ID NO: 30680 - protein, 10 aa, Artificial Sequence
  Description of Artificial Sequence: Synthetic epitope
NNTSVMMFKK

SEQ ID NO: 30681 - protein, 10 aa, Artificial Sequence
  Description of Artificial Sequence: Synthetic epitope
NNTVRMINSP

SEQ ID NO: 30682 - protein, 10 aa, Artificial Sequence
  Description of Artificial Sequence: Synthetic epitope
NNTVSSESKD

SEQ ID NO: 30683 - protein, 10 aa, Artificial Sequence
  Description of Artificial Sequence: Synthetic epitope
NNVEAVSQTS

SEQ ID NO: 30684 - protein, 10 aa, Artificial Sequence
  Description of Artificial Sequence: Synthetic epitope
NNVEVLMSGN

SEQ ID NO: 30685 - protein, 10 aa, Artificial Sequence
  Description of Artificial Sequence: Synthetic epitope
NNVISKLLPT

SEQ ID NO: 30686 - protein, 10 aa, Artificial Sequence
  Description of Artificial Sequence: Synthetic epitope
NNVKVLKAVD

SEQ ID NO: 30687 - protein, 10 aa, Artificial Sequence
  Description of Artificial Sequence: Synthetic epitope
NNVQSIIESR

SEQ ID NO: 30688 - protein, 10 aa, Artificial Sequence
  Description of Artificial Sequence: Synthetic epitope
NNVSQIKLMH

SEQ ID NO: 30689 - protein, 10 aa, Artificial Sequence
  Description of Artificial Sequence: Synthetic epitope
NNVVEQLKDW

SEQ ID NO: 30690 - protein, 10 aa, Artificial Sequence
  Description of Artificial Sequence: Synthetic epitope
NNVYLAVADT

SEQ ID NO: 30691 - protein, 10 aa, Artificial Sequence
  Description of Artificial Sequence: Synthetic epitope
NNWDKWMAKK

SEQ ID NO: 30692 - protein, 10 aa, Artificial Sequence
  Description of Artificial Sequence: Synthetic epitope
NNWLRSAEIG

SEQ ID NO: 30693 - protein, 10 aa, Artificial Sequence
  Description of Artificial Sequence: Synthetic epitope
NPAATVNDES

SEQ ID NO: 30694 - protein, 10 aa, Artificial Sequence
  Description of Artificial Sequence: Synthetic epitope
NPARTIYTTR

SEQ ID NO: 30695 - protein, 10 aa, Artificial Sequence
  Description of Artificial Sequence: Synthetic epitope
NPDEIDETTE

SEQ ID NO: 30696 - protein, 10 aa, Artificial Sequence
  Description of Artificial Sequence: Synthetic epitope
NPDESAKLAD

SEQ ID NO: 30697 - protein, 10 aa, Artificial Sequence
  Description of Artificial Sequence: Synthetic epitope
NPDKISAPLL

SEQ ID NO: 30698 - protein, 10 aa, Artificial Sequence
  Description of Artificial Sequence: Synthetic epitope
NPEKISDEKN

SEQ ID NO: 30699 - protein, 10 aa, Artificial Sequence
  Description of Artificial Sequence: Synthetic epitope
NPEQSAMLPQ

SEQ ID NO: 30700 - protein, 10 aa, Artificial Sequence
  Description of Artificial Sequence: Synthetic epitope
NPESTISVSQ

SEQ ID NO: 30701 - protein, 10 aa, Artificial Sequence
  Description of Artificial Sequence: Synthetic epitope
NPFEETADGD

SEQ ID NO: 30702 - protein, 10 aa, Artificial Sequence
  Description of Artificial Sequence: Synthetic epitope
NPHLKSTLAM

SEQ ID NO: 30703 - protein, 10 aa, Artificial Sequence
  Description of Artificial Sequence: Synthetic epitope
NPHRSQKMSQ

SEQ ID NO: 30704 - protein, 10 aa, Artificial Sequence
  Description of Artificial Sequence: Synthetic epitope
NPKIITNLSK

SEQ ID NO: 30705 - protein, 10 aa, Artificial Sequence
  Description of Artificial Sequence: Synthetic epitope
NPKKAAEITV

SEQ ID NO: 30706 - protein, 10 aa, Artificial Sequence
  Description of Artificial Sequence: Synthetic epitope
NPKKMGERFN

SEQ ID NO: 30707 - protein, 10 aa, Artificial Sequence
  Description of Artificial Sequence: Synthetic epitope
NPKQAATQSE

SEQ ID NO: 30708 - protein, 10 aa, Artificial Sequence
  Description of Artificial Sequence: Synthetic epitope
NPKTNALEPG

SEQ ID NO: 30709 - protein, 10 aa, Artificial Sequence
  Description of Artificial Sequence: Synthetic epitope
NPLEEHNHQS

SEQ ID NO: 30710 - protein, 10 aa, Artificial Sequence
  Description of Artificial Sequence: Synthetic epitope
NPLIQMLKAA

SEQ ID NO: 30711 - protein, 10 aa, Artificial Sequence
  Description of Artificial Sequence: Synthetic epitope
NPLRNSMRNV

SEQ ID NO: 30712 - protein, 10 aa, Artificial Sequence
  Description of Artificial Sequence: Synthetic epitope
NPMRKASNQN

SEQ ID NO: 30713 - protein, 10 aa, Artificial Sequence
  Description of Artificial Sequence: Synthetic epitope
NPMSTAMQNE

SEQ ID NO: 30714 - protein, 10 aa, Artificial Sequence
  Description of Artificial Sequence: Synthetic epitope
NPNKRQRQPP

SEQ ID NO: 30715 - protein, 10 aa, Artificial Sequence
  Description of Artificial Sequence: Synthetic epitope
NPNLSMAQRR

SEQ ID NO: 30716 - protein, 10 aa, Artificial Sequence
  Description of Artificial Sequence: Synthetic epitope
NPNLSNRRGS

SEQ ID NO: 30717 - protein, 10 aa, Artificial Sequence
  Description of Artificial Sequence: Synthetic epitope
NPNMDYKNGE

SEQ ID NO: 30718 - protein, 10 aa, Artificial Sequence
  Description of Artificial Sequence: Synthetic epitope
NPNMVKNRDR

SEQ ID NO: 30719 - protein, 10 aa, Artificial Sequence
  Description of Artificial Sequence: Synthetic epitope
NPNWQQSDLR

SEQ ID NO: 30720 - protein, 10 aa, Artificial Sequence
  Description of Artificial Sequence: Synthetic epitope
NPPFTTQSRS

SEQ ID NO: 30721 - protein, 10 aa, Artificial Sequence
  Description of Artificial Sequence: Synthetic epitope
NPQSVNSVMV

SEQ ID NO: 30722 - protein, 10 aa, Artificial Sequence
  Description of Artificial Sequence: Synthetic epitope
NPQVSKTEYK

SEQ ID NO: 30723 - protein, 10 aa, Artificial Sequence
  Description of Artificial Sequence: Synthetic epitope
NPRDDIATEA

SEQ ID NO: 30724 - protein, 10 aa, Artificial Sequence
  Description of Artificial Sequence: Synthetic epitope
NPRELQVKYL

SEQ ID NO: 30725 - protein, 10 aa, Artificial Sequence
  Description of Artificial Sequence: Synthetic epitope
NPRGSSNVIQ

SEQ ID NO: 30726 - protein, 10 aa, Artificial Sequence
  Description of Artificial Sequence: Synthetic epitope
NPRLNILDTL

SEQ ID NO: 30727 - protein, 10 aa, Artificial Sequence
  Description of Artificial Sequence: Synthetic epitope
NPRLVKVTGQ

SEQ ID NO: 30728 - protein, 10 aa, Artificial Sequence
  Description of Artificial Sequence: Synthetic epitope
NPRNTIDTKD

SEQ ID NO: 30729 - protein, 10 aa, Artificial Sequence
  Description of Artificial Sequence: Synthetic epitope
NPRQNWNDVT

SEQ ID NO: 30730 - protein, 10 aa, Artificial Sequence
  Description of Artificial Sequence: Synthetic epitope
NPRTSNEVQY

SEQ ID NO: 30731 - protein, 10 aa, Artificial Sequence
  Description of Artificial Sequence: Synthetic epitope
NPSIKNTLQI

SEQ ID NO: 30732 - protein, 10 aa, Artificial Sequence
  Description of Artificial Sequence: Synthetic epitope
NPSLLAAEDQ

SEQ ID NO: 30733 - protein, 10 aa, Artificial Sequence
  Description of Artificial Sequence: Synthetic epitope
NPSQGNEWSH

SEQ ID NO: 30734 - protein, 10 aa, Artificial Sequence
  Description of Artificial Sequence: Synthetic epitope
NPSTKRKNTG

SEQ ID NO: 30735 - protein, 10 aa, Artificial Sequence
  Description of Artificial Sequence: Synthetic epitope
NPSTLSAQPQ

SEQ ID NO: 30736 - protein, 10 aa, Artificial Sequence
  Description of Artificial Sequence: Synthetic epitope
NPTITVVTSV

SEQ ID NO: 30737 - protein, 10 aa, Artificial Sequence
  Description of Artificial Sequence: Synthetic epitope
NPTNTSGTTR

SEQ ID NO: 30738 - protein, 10 aa, Artificial Sequence
  Description of Artificial Sequence: Synthetic epitope
NPVQASQLEE

SEQ ID NO: 30739 - protein, 10 aa, Artificial Sequence
  Description of Artificial Sequence: Synthetic epitope
NPVVKAAPAL

SEQ ID NO: 30740 - protein, 10 aa, Artificial Sequence
  Description of Artificial Sequence: Synthetic epitope
NPWNWGKLAE

SEQ ID NO: 30741 - protein, 10 aa, Artificial Sequence
  Description of Artificial Sequence: Synthetic epitope
NPYAKTMRRN

SEQ ID NO: 30742 - protein, 10 aa, Artificial Sequence
  Description of Artificial Sequence: Synthetic epitope
NPYTDRVVER

SEQ ID NO: 30743 - protein, 10 aa, Artificial Sequence
  Description of Artificial Sequence: Synthetic epitope
NPYVMRRPNF

SEQ ID NO: 30744 - protein, 10 aa, Artificial Sequence
  Description of Artificial Sequence: Synthetic epitope
NQAAQHSQKQ

SEQ ID NO: 30745 - protein, 10 aa, Artificial Sequence
  Description of Artificial Sequence: Synthetic epitope
NQAASERLAA

SEQ ID NO: 30746 - protein, 10 aa, Artificial Sequence
  Description of Artificial Sequence: Synthetic epitope
NQAEESTDSL

SEQ ID NO: 30747 - protein, 10 aa, Artificial Sequence
  Description of Artificial Sequence: Synthetic epitope
NQAGLLSSDS

SEQ ID NO: 30748 - protein, 10 aa, Artificial Sequence
  Description of Artificial Sequence: Synthetic epitope
NQAIMSSKNI

SEQ ID NO: 30749 - protein, 10 aa, Artificial Sequence
  Description of Artificial Sequence: Synthetic epitope
NQATEDVYQL

SEQ ID NO: 30750 - protein, 10 aa, Artificial Sequence
  Description of Artificial Sequence: Synthetic epitope
NQATKEQQEL

SEQ ID NO: 30751 - protein, 10 aa, Artificial Sequence
  Description of Artificial Sequence: Synthetic epitope
NQATSQVESK

SEQ ID NO: 30752 - protein, 10 aa, Artificial Sequence
  Description of Artificial Sequence: Synthetic epitope
NQAVKRGYNS

SEQ ID NO: 30753 - protein, 10 aa, Artificial Sequence
  Description of Artificial Sequence: Synthetic epitope
NQAVQFISAL

SEQ ID NO: 30754 - protein, 10 aa, Artificial Sequence
  Description of Artificial Sequence: Synthetic epitope
NQAVRIVKEP

SEQ ID NO: 30755 - protein, 10 aa, Artificial Sequence
  Description of Artificial Sequence: Synthetic epitope
NQDMSGQQAA

SEQ ID NO: 30756 - protein, 10 aa, Artificial Sequence
  Description of Artificial Sequence: Synthetic epitope
NQDNSETAEQ

SEQ ID NO: 30757 - protein, 10 aa, Artificial Sequence
  Description of Artificial Sequence: Synthetic epitope
NQDPEAVDED

SEQ ID NO: 30758 - protein, 10 aa, Artificial Sequence
  Description of Artificial Sequence: Synthetic epitope
NQDRNNALPS

SEQ ID NO: 30759 - protein, 10 aa, Artificial Sequence
  Description of Artificial Sequence: Synthetic epitope
NQDSSTSELS

SEQ ID NO: 30760 - protein, 10 aa, Artificial Sequence
  Description of Artificial Sequence: Synthetic epitope
NQDTEQETSE

SEQ ID NO: 30761 - protein, 10 aa, Artificial Sequence
  Description of Artificial Sequence: Synthetic epitope
NQDTLTVRAE

SEQ ID NO: 30762 - protein, 10 aa, Artificial Sequence
  Description of Artificial Sequence: Synthetic epitope
NQDVATAVAS

SEQ ID NO: 30763 - protein, 10 aa, Artificial Sequence
  Description of Artificial Sequence: Synthetic epitope
NQDVTSDDKQ

SEQ ID NO: 30764 - protein, 10 aa, Artificial Sequence
  Description of Artificial Sequence: Synthetic epitope
NQEAKKEKKD

SEQ ID NO: 30765 - protein, 10 aa, Artificial Sequence
  Description of Artificial Sequence: Synthetic epitope
NQEEAAYIQE

SEQ ID NO: 30766 - protein, 10 aa, Artificial Sequence
  Description of Artificial Sequence: Synthetic epitope
NQEEKLNLDD

SEQ ID NO: 30767 - protein, 10 aa, Artificial Sequence
  Description of Artificial Sequence: Synthetic epitope
NQEEMTLDLL

SEQ ID NO: 30768 - protein, 10 aa, Artificial Sequence
  Description of Artificial Sequence: Synthetic epitope
NQEENDAVSS

SEQ ID NO: 30769 - protein, 10 aa, Artificial Sequence
  Description of Artificial Sequence: Synthetic epitope
NQEEQLTVNS

SEQ ID NO: 30770 - protein, 10 aa, Artificial Sequence
  Description of Artificial Sequence: Synthetic epitope
NQEERESSQA

SEQ ID NO: 30771 - protein, 10 aa, Artificial Sequence
  Description of Artificial Sequence: Synthetic epitope
NQEIASRHSS

SEQ ID NO: 30772 - protein, 10 aa, Artificial Sequence
  Description of Artificial Sequence: Synthetic epitope
NQEIRRQKER

SEQ ID NO: 30773 - protein, 10 aa, Artificial Sequence
  Description of Artificial Sequence: Synthetic epitope
NQEKLLKSEG

SEQ ID NO: 30774 - protein, 10 aa, Artificial Sequence
  Description of Artificial Sequence: Synthetic epitope
NQELSSKENI

SEQ ID NO: 30775 - protein, 10 aa, Artificial Sequence
  Description of Artificial Sequence: Synthetic epitope
NQEQNAGPMA

SEQ ID NO: 30776 - protein, 10 aa, Artificial Sequence
  Description of Artificial Sequence: Synthetic epitope
NQESFAAVQD

SEQ ID NO: 30777 - protein, 10 aa, Artificial Sequence
  Description of Artificial Sequence: Synthetic epitope
NQESMPSLSF

SEQ ID NO: 30778 - protein, 10 aa, Artificial Sequence
  Description of Artificial Sequence: Synthetic epitope
NQEVLSFTEQ

SEQ ID NO: 30779 - protein, 10 aa, Artificial Sequence
  Description of Artificial Sequence: Synthetic epitope
NQEVMNLDDI

SEQ ID NO: 30780 - protein, 10 aa, Artificial Sequence
  Description of Artificial Sequence: Synthetic epitope
NQEVNKGVKE

SEQ ID NO: 30781 - protein, 10 aa, Artificial Sequence
  Description of Artificial Sequence: Synthetic epitope
NQFDHYSKQD

SEQ ID NO: 30782 - protein, 10 aa, Artificial Sequence
  Description of Artificial Sequence: Synthetic epitope
NQFKSVQVER

SEQ ID NO: 30783 - protein, 10 aa, Artificial Sequence
  Description of Artificial Sequence: Synthetic epitope
NQFSEHDKTL

SEQ ID NO: 30784 - protein, 10 aa, Artificial Sequence
  Description of Artificial Sequence: Synthetic epitope
NQFTKYSYKY

SEQ ID NO: 30785 - protein, 10 aa, Artificial Sequence
  Description of Artificial Sequence: Synthetic epitope
NQGANNKKIA

SEQ ID NO: 30786 - protein, 10 aa, Artificial Sequence
  Description of Artificial Sequence: Synthetic epitope
NQGEKKNALA

SEQ ID NO: 30787 - protein, 10 aa, Artificial Sequence
  Description of Artificial Sequence: Synthetic epitope
NQGETVDLDA

SEQ ID NO: 30788 - protein, 10 aa, Artificial Sequence
  Description of Artificial Sequence: Synthetic epitope
NQGQAQTNLT

SEQ ID NO: 30789 - protein, 10 aa, Artificial Sequence
  Description of Artificial Sequence: Synthetic epitope
NQHELSAIQE

SEQ ID NO: 30790 - protein, 10 aa, Artificial Sequence
  Description of Artificial Sequence: Synthetic epitope
NQHPASDKIE

SEQ ID NO: 30791 - protein, 10 aa, Artificial Sequence
  Description of Artificial Sequence: Synthetic epitope
NQHSILMGEG

SEQ ID NO: 30792 - protein, 10 aa, Artificial Sequence
  Description of Artificial Sequence: Synthetic epitope
NQHTVFNLHQ

SEQ ID NO: 30793 - protein, 10 aa, Artificial Sequence
  Description of Artificial Sequence: Synthetic epitope
NQHVQSLQSE

SEQ ID NO: 30794 - protein, 10 aa, Artificial Sequence
  Description of Artificial Sequence: Synthetic epitope
NQIEISMQHE

SEQ ID NO: 30795 - protein, 10 aa, Artificial Sequence
  Description of Artificial Sequence: Synthetic epitope
NQIISATTSN

SEQ ID NO: 30796 - protein, 10 aa, Artificial Sequence
  Description of Artificial Sequence: Synthetic epitope
NQIMALQRLK

SEQ ID NO: 30797 - protein, 10 aa, Artificial Sequence
  Description of Artificial Sequence: Synthetic epitope
NQIQETISDN

SEQ ID NO: 30798 - protein, 10 aa, Artificial Sequence
  Description of Artificial Sequence: Synthetic epitope
NQISNVSNVN

SEQ ID NO: 30799 - protein, 10 aa, Artificial Sequence
  Description of Artificial Sequence: Synthetic epitope
NQKAGPKTIL

SEQ ID NO: 30800 - protein, 10 aa, Artificial Sequence
  Description of Artificial Sequence: Synthetic epitope
NQKASHVSKK

SEQ ID NO: 30801 - protein, 10 aa, Artificial Sequence
  Description of Artificial Sequence: Synthetic epitope
NQKASLAKHQ

SEQ ID NO: 30802 - protein, 10 aa, Artificial Sequence
  Description of Artificial Sequence: Synthetic epitope
NQKESLSSED

SEQ ID NO: 30803 - protein, 10 aa, Artificial Sequence
  Description of Artificial Sequence: Synthetic epitope
NQKGKTATKD

SEQ ID NO: 30804 - protein, 10 aa, Artificial Sequence
  Description of Artificial Sequence: Synthetic epitope
NQKIADINLR

SEQ ID NO: 30805 - protein, 10 aa, Artificial Sequence
  Description of Artificial Sequence: Synthetic epitope
NQKILKRTGQ

SEQ ID NO: 30806 - protein, 10 aa, Artificial Sequence
  Description of Artificial Sequence: Synthetic epitope
NQKINKGPVD

SEQ ID NO: 30807 - protein, 10 aa, Artificial Sequence
  Description of Artificial Sequence: Synthetic epitope
NQKKDILGAK

SEQ ID NO: 30808 - protein, 10 aa, Artificial Sequence
  Description of Artificial Sequence: Synthetic epitope
NQKLAEQKIV

SEQ ID NO: 30809 - protein, 10 aa, Artificial Sequence
  Description of Artificial Sequence: Synthetic epitope
NQKLASDPAL

SEQ ID NO: 30810 - protein, 10 aa, Artificial Sequence
  Description of Artificial Sequence: Synthetic epitope
NQKLKKSMLH

SEQ ID NO: 30811 - protein, 10 aa, Artificial Sequence
  Description of Artificial Sequence: Synthetic epitope
NQKLTNKNNK

SEQ ID NO: 30812 - protein, 10 aa, Artificial Sequence
  Description of Artificial Sequence: Synthetic epitope
NQKNKLLKGI

SEQ ID NO: 30813 - protein, 10 aa, Artificial Sequence
  Description of Artificial Sequence: Synthetic epitope
NQKVKTLEVE

SEQ ID NO: 30814 - protein, 10 aa, Artificial Sequence
  Description of Artificial Sequence: Synthetic epitope
NQLAGIAPSQ

SEQ ID NO: 30815 - protein, 10 aa, Artificial Sequence
  Description of Artificial Sequence: Synthetic epitope
NQLEAKGVNS

SEQ ID NO: 30816 - protein, 10 aa, Artificial Sequence
  Description of Artificial Sequence: Synthetic epitope
NQLESIVDFN

SEQ ID NO: 30817 - protein, 10 aa, Artificial Sequence
  Description of Artificial Sequence: Synthetic epitope
NQLKFARSLQ

SEQ ID NO: 30818 - protein, 10 aa, Artificial Sequence
  Description of Artificial Sequence: Synthetic epitope
NQLKNASNDI

SEQ ID NO: 30819 - protein, 10 aa, Artificial Sequence
  Description of Artificial Sequence: Synthetic epitope
NQLLDRFIFE

SEQ ID NO: 30820 - protein, 10 aa, Artificial Sequence
  Description of Artificial Sequence: Synthetic epitope
NQLLTSPSSA

SEQ ID NO: 30821 - protein, 10 aa, Artificial Sequence
  Description of Artificial Sequence: Synthetic epitope
NQLQQNMQEG

SEQ ID NO: 30822 - protein, 10 aa, Artificial Sequence
  Description of Artificial Sequence: Synthetic epitope
NQLRLSDAGQ

SEQ ID NO: 30823 - protein, 10 aa, Artificial Sequence
  Description of Artificial Sequence: Synthetic epitope
NQLSAAIPAT

SEQ ID NO: 30824 - protein, 10 aa, Artificial Sequence
  Description of Artificial Sequence: Synthetic epitope
NQLSQQKPNQ

SEQ ID NO: 30825 - protein, 10 aa, Artificial Sequence
  Description of Artificial Sequence: Synthetic epitope
NQLTPVTNSE

SEQ ID NO: 30826 - protein, 10 aa, Artificial Sequence
  Description of Artificial Sequence: Synthetic epitope
NQLTQGDQEK

SEQ ID NO: 30827 - protein, 10 aa, Artificial Sequence
  Description of Artificial Sequence: Synthetic epitope
NQLYQLQLAY

SEQ ID NO: 30828 - protein, 10 aa, Artificial Sequence
  Description of Artificial Sequence: Synthetic epitope
NQMATENVMD

SEQ ID NO: 30829 - protein, 10 aa, Artificial Sequence
  Description of Artificial Sequence: Synthetic epitope
NQMPLGPYVT

SEQ ID NO: 30830 - protein, 10 aa, Artificial Sequence
  Description of Artificial Sequence: Synthetic epitope
NQMQSKGGYG

SEQ ID NO: 30831 - protein, 10 aa, Artificial Sequence
  Description of Artificial Sequence: Synthetic epitope
NQMVPQIEGN

SEQ ID NO: 30832 - protein, 10 aa, Artificial Sequence
  Description of Artificial Sequence: Synthetic epitope
NQMVTQNRTP

SEQ ID NO: 30833 - protein, 10 aa, Artificial Sequence
  Description of Artificial Sequence: Synthetic epitope
NQNEMAKAVS

SEQ ID NO: 30834 - protein, 10 aa, Artificial Sequence
  Description of Artificial Sequence: Synthetic epitope
NQNESQKRNA

SEQ ID NO: 30835 - protein, 10 aa, Artificial Sequence
  Description of Artificial Sequence: Synthetic epitope
NQNGDHNTKV

SEQ ID NO: 30836 - protein, 10 aa, Artificial Sequence
  Description of Artificial Sequence: Synthetic epitope
NQNLSEAKLD

SEQ ID NO: 30837 - protein, 10 aa, Artificial Sequence
  Description of Artificial Sequence: Synthetic epitope
NQNLTSTKKV

SEQ ID NO: 30838 - protein, 10 aa, Artificial Sequence
  Description of Artificial Sequence: Synthetic epitope
NQNQKQVEQD

SEQ ID NO: 30839 - protein, 10 aa, Artificial Sequence
  Description of Artificial Sequence: Synthetic epitope
NQNQLDFLPA

SEQ ID NO: 30840 - protein, 10 aa, Artificial Sequence
  Description of Artificial Sequence: Synthetic epitope
NQNSKKLAAG

SEQ ID NO: 30841 - protein, 10 aa, Artificial Sequence
  Description of Artificial Sequence: Synthetic epitope
NQNSTSSHLG

SEQ ID NO: 30842 - protein, 10 aa, Artificial Sequence
  Description of Artificial Sequence: Synthetic epitope
NQNVKTHHDH

SEQ ID NO: 30843 - protein, 10 aa, Artificial Sequence
  Description of Artificial Sequence: Synthetic epitope
NQNWERYLAE

SEQ ID NO: 30844 - protein, 10 aa, Artificial Sequence
  Description of Artificial Sequence: Synthetic epitope
NQPDSIVDEG

SEQ ID NO: 30845 - protein, 10 aa, Artificial Sequence
  Description of Artificial Sequence: Synthetic epitope
NQPFALEMIK

SEQ ID NO: 30846 - protein, 10 aa, Artificial Sequence
  Description of Artificial Sequence: Synthetic epitope
NQPIEPLNRD

SEQ ID NO: 30847 - protein, 10 aa, Artificial Sequence
  Description of Artificial Sequence: Synthetic epitope
NQPKQNQPTA

SEQ ID NO: 30848 - protein, 10 aa, Artificial Sequence
  Description of Artificial Sequence: Synthetic epitope
NQPMQVMAEP

SEQ ID NO: 30849 - protein, 10 aa, Artificial Sequence
  Description of Artificial Sequence: Synthetic epitope
NQPSMTVIFL

SEQ ID NO: 30850 - protein, 10 aa, Artificial Sequence
  Description of Artificial Sequence: Synthetic epitope
NQPTSLETAL

SEQ ID NO: 30851 - protein, 10 aa, Artificial Sequence
  Description of Artificial Sequence: Synthetic epitope
NQPVSESQSS

SEQ ID NO: 30852 - protein, 10 aa, Artificial Sequence
  Description of Artificial Sequence: Synthetic epitope
NQQGNQERHL

SEQ ID NO: 30853 - protein, 10 aa, Artificial Sequence
  Description of Artificial Sequence: Synthetic epitope
NQQIHEQEKK

SEQ ID NO: 30854 - protein, 10 aa, Artificial Sequence
  Description of Artificial Sequence: Synthetic epitope
NQQLQAGAVA

SEQ ID NO: 30855 - protein, 10 aa, Artificial Sequence
  Description of Artificial Sequence: Synthetic epitope
NQQMHRKTAS

SEQ ID NO: 30856 - protein, 10 aa, Artificial Sequence
  Description of Artificial Sequence: Synthetic epitope
NQQMTVQAQP

SEQ ID NO: 30857 - protein, 10 aa, Artificial Sequence
  Description of Artificial Sequence: Synthetic epitope
NQQTTLDTPQ

SEQ ID NO: 30858 - protein, 10 aa, Artificial Sequence
  Description of Artificial Sequence: Synthetic epitope
NQQVNSASTP

SEQ ID NO: 30859 - protein, 10 aa, Artificial Sequence
  Description of Artificial Sequence: Synthetic epitope
NQQVSLNSQE

SEQ ID NO: 30860 - protein, 10 aa, Artificial Sequence
  Description of Artificial Sequence: Synthetic epitope
NQQVVTSSQQ

SEQ ID NO: 30861 - protein, 10 aa, Artificial Sequence
  Description of Artificial Sequence: Synthetic epitope
NQRAALNQQI

SEQ ID NO: 30862 - protein, 10 aa, Artificial Sequence
  Description of Artificial Sequence: Synthetic epitope
NQRAQAVLQA

SEQ ID NO: 30863 - protein, 10 aa, Artificial Sequence
  Description of Artificial Sequence: Synthetic epitope
NQRITAVRRV

SEQ ID NO: 30864 - protein, 10 aa, Artificial Sequence
  Description of Artificial Sequence: Synthetic epitope
NQRKADLVNR

SEQ ID NO: 30865 - protein, 10 aa, Artificial Sequence
  Description of Artificial Sequence: Synthetic epitope
NQRKSRVSEL

SEQ ID NO: 30866 - protein, 10 aa, Artificial Sequence
  Description of Artificial Sequence: Synthetic epitope
NQRMDKLEKT

SEQ ID NO: 30867 - protein, 10 aa, Artificial Sequence
  Description of Artificial Sequence: Synthetic epitope
NQRSKESLGE

SEQ ID NO: 30868 - protein, 10 aa, Artificial Sequence
  Description of Artificial Sequence: Synthetic epitope
NQSASQSSNP

SEQ ID NO: 30869 - protein, 10 aa, Artificial Sequence
  Description of Artificial Sequence: Synthetic epitope
NQSATSSFKS

SEQ ID NO: 30870 - protein, 10 aa, Artificial Sequence
  Description of Artificial Sequence: Synthetic epitope
NQSDKPTMTI

SEQ ID NO: 30871 - protein, 10 aa, Artificial Sequence
  Description of Artificial Sequence: Synthetic epitope
NQSEATIAIS

SEQ ID NO: 30872 - protein, 10 aa, Artificial Sequence
  Description of Artificial Sequence: Synthetic epitope
NQSEDLSVFY

SEQ ID NO: 30873 - protein, 10 aa, Artificial Sequence
  Description of Artificial Sequence: Synthetic epitope
NQSFKFGNQK

SEQ ID NO: 30874 - protein, 10 aa, Artificial Sequence
  Description of Artificial Sequence: Synthetic epitope
NQSKEPAESA

SEQ ID NO: 30875 - protein, 10 aa, Artificial Sequence
  Description of Artificial Sequence: Synthetic epitope
NQSKTTPFKD

SEQ ID NO: 30876 - protein, 10 aa, Artificial Sequence
  Description of Artificial Sequence: Synthetic epitope
NQSLRASNVI

SEQ ID NO: 30877 - protein, 10 aa, Artificial Sequence
  Description of Artificial Sequence: Synthetic epitope
NQSPKVKAGH

SEQ ID NO: 30878 - protein, 10 aa, Artificial Sequence
  Description of Artificial Sequence: Synthetic epitope
NQSQGTLKFE

SEQ ID NO: 30879 - protein, 10 aa, Artificial Sequence
  Description of Artificial Sequence: Synthetic epitope
NQSQNFAEEM

SEQ ID NO: 30880 - protein, 10 aa, Artificial Sequence
  Description of Artificial Sequence: Synthetic epitope
NQSRNTSSAQ

SEQ ID NO: 30881 - protein, 10 aa, Artificial Sequence
  Description of Artificial Sequence: Synthetic epitope
NQSVNRVKEL

SEQ ID NO: 30882 - protein, 10 aa, Artificial Sequence
  Description of Artificial Sequence: Synthetic epitope
NQTALQAVTP

SEQ ID NO: 30883 - protein, 10 aa, Artificial Sequence
  Description of Artificial Sequence: Synthetic epitope
NQTETPIQTT

SEQ ID NO: 30884 - protein, 10 aa, Artificial Sequence
  Description of Artificial Sequence: Synthetic epitope
NQTFSQVSEL

SEQ ID NO: 30885 - protein, 10 aa, Artificial Sequence
  Description of Artificial Sequence: Synthetic epitope
NQTGIEAKKN

SEQ ID NO: 30886 - protein, 10 aa, Artificial Sequence
  Description of Artificial Sequence: Synthetic epitope
NQTIGRMQRA

SEQ ID NO: 30887 - protein, 10 aa, Artificial Sequence
  Description of Artificial Sequence: Synthetic epitope
NQTLSTNKSG

SEQ ID NO: 30888 - protein, 10 aa, Artificial Sequence
  Description of Artificial Sequence: Synthetic epitope
NQTLTSNEQT

SEQ ID NO: 30889 - protein, 10 aa, Artificial Sequence
  Description of Artificial Sequence: Synthetic epitope
NQTNGTTKES

SEQ ID NO: 30890 - protein, 10 aa, Artificial Sequence
  Description of Artificial Sequence: Synthetic epitope
NQTQHKQRPQ

SEQ ID NO: 30891 - protein, 10 aa, Artificial Sequence
  Description of Artificial Sequence: Synthetic epitope
NQTQLQPRAV

SEQ ID NO: 30892 - protein, 10 aa, Artificial Sequence
  Description of Artificial Sequence: Synthetic epitope
NQTRVNLSSD

SEQ ID NO: 30893 - protein, 10 aa, Artificial Sequence
  Description of Artificial Sequence: Synthetic epitope
NQTSQAPLLS

SEQ ID NO: 30894 - protein, 10 aa, Artificial Sequence
  Description of Artificial Sequence: Synthetic epitope
NQTSSEAGGS

SEQ ID NO: 30895 - protein, 10 aa, Artificial Sequence
  Description of Artificial Sequence: Synthetic epitope
NQTTQVVPLR

SEQ ID NO: 30896 - protein, 10 aa, Artificial Sequence
  Description of Artificial Sequence: Synthetic epitope
NQTVAVVNRR

SEQ ID NO: 30897 - protein, 10 aa, Artificial Sequence
  Description of Artificial Sequence: Synthetic epitope
NQTVMLSAKQ

SEQ ID NO: 30898 - protein, 10 aa, Artificial Sequence
  Description of Artificial Sequence: Synthetic epitope
NQVDSLSDDF

SEQ ID NO: 30899 - protein, 10 aa, Artificial Sequence
  Description of Artificial Sequence: Synthetic epitope
NQVETESVGD

SEQ ID NO: 30900 - protein, 10 aa, Artificial Sequence
  Description of Artificial Sequence: Synthetic epitope
NQVFFSEAVL

SEQ ID NO: 30901 - protein, 10 aa, Artificial Sequence
  Description of Artificial Sequence: Synthetic epitope
NQVIENRLEN

SEQ ID NO: 30902 - protein, 10 aa, Artificial Sequence
  Description of Artificial Sequence: Synthetic epitope
NQVITIKDSQ

SEQ ID NO: 30903 - protein, 10 aa, Artificial Sequence
  Description of Artificial Sequence: Synthetic epitope
NQVKSSLLKT

SEQ ID NO: 30904 - protein, 10 aa, Artificial Sequence
  Description of Artificial Sequence: Synthetic epitope
NQVKTIAQGN

SEQ ID NO: 30905 - protein, 10 aa, Artificial Sequence
  Description of Artificial Sequence: Synthetic epitope
NQVLSKVAMS

SEQ ID NO: 30906 - protein, 10 aa, Artificial Sequence
  Description of Artificial Sequence: Synthetic epitope
NQVNDLTTAL

SEQ ID NO: 30907 - protein, 10 aa, Artificial Sequence
  Description of Artificial Sequence: Synthetic epitope
NQVSAAVGKD

SEQ ID NO: 30908 - protein, 10 aa, Artificial Sequence
  Description of Artificial Sequence: Synthetic epitope
NQVSTIWDDN

SEQ ID NO: 30909 - protein, 10 aa, Artificial Sequence
  Description of Artificial Sequence: Synthetic epitope
NQVTATKADG

SEQ ID NO: 30910 - protein, 10 aa, Artificial Sequence
  Description of Artificial Sequence: Synthetic epitope
NQVTQDPIEE

SEQ ID NO: 30911 - protein, 10 aa, Artificial Sequence
  Description of Artificial Sequence: Synthetic epitope
NQVVSQKPAD

SEQ ID NO: 30912 - protein, 10 aa, Artificial Sequence
  Description of Artificial Sequence: Synthetic epitope
NQWIDNVEKM

SEQ ID NO: 30913 - protein, 10 aa, Artificial Sequence
  Description of Artificial Sequence: Synthetic epitope
NQWIKQPLMD

SEQ ID NO: 30914 - protein, 10 aa, Artificial Sequence
  Description of Artificial Sequence: Synthetic epitope
NQWSMSRPLL

SEQ ID NO: 30915 - protein, 10 aa, Artificial Sequence
  Description of Artificial Sequence: Synthetic epitope
NQWTASIVEQ

SEQ ID NO: 30916 - protein, 10 aa, Artificial Sequence
  Description of Artificial Sequence: Synthetic epitope
NQWTTNVVEQ

SEQ ID NO: 30917 - protein, 10 aa, Artificial Sequence
  Description of Artificial Sequence: Synthetic epitope
NQYQIYSESF

SEQ ID NO: 30918 - protein, 10 aa, Artificial Sequence
  Description of Artificial Sequence: Synthetic epitope
NQYSEGVQRE

SEQ ID NO: 30919 - protein, 10 aa, Artificial Sequence
  Description of Artificial Sequence: Synthetic epitope
NRAASASESA

SEQ ID NO: 30920 - protein, 10 aa, Artificial Sequence
  Description of Artificial Sequence: Synthetic epitope
NRAENTERKQ

SEQ ID NO: 30921 - protein, 10 aa, Artificial Sequence
  Description of Artificial Sequence: Synthetic epitope
NRAFWESSIV

SEQ ID NO: 30922 - protein, 10 aa, Artificial Sequence
  Description of Artificial Sequence: Synthetic epitope
NRAIWHMNGV

SEQ ID NO: 30923 - protein, 10 aa, Artificial Sequence
  Description of Artificial Sequence: Synthetic epitope
NRAQSVNSAA

SEQ ID NO: 30924 - protein, 10 aa, Artificial Sequence
  Description of Artificial Sequence: Synthetic epitope
NRAQVSKELG

SEQ ID NO: 30925 - protein, 10 aa, Artificial Sequence
  Description of Artificial Sequence: Synthetic epitope
NRAVDATREA

SEQ ID NO: 30926 - protein, 10 aa, Artificial Sequence
  Description of Artificial Sequence: Synthetic epitope
NRAVELKVYE

SEQ ID NO: 30927 - protein, 10 aa, Artificial Sequence
  Description of Artificial Sequence: Synthetic epitope
NRAVKSLQNA

SEQ ID NO: 30928 - protein, 10 aa, Artificial Sequence
  Description of Artificial Sequence: Synthetic epitope
NRDENQSINH

SEQ ID NO: 30929 - protein, 10 aa, Artificial Sequence
  Description of Artificial Sequence: Synthetic epitope
NRDGGTFISD

SEQ ID NO: 30930 - protein, 10 aa, Artificial Sequence
  Description of Artificial Sequence: Synthetic epitope
NRDQNQALVQ

SEQ ID NO: 30931 - protein, 10 aa, Artificial Sequence
  Description of Artificial Sequence: Synthetic epitope
NRDRHTVGQR

SEQ ID NO: 30932 - protein, 10 aa, Artificial Sequence
  Description of Artificial Sequence: Synthetic epitope
NREEQTTLHL

SEQ ID NO: 30933 - protein, 10 aa, Artificial Sequence
  Description of Artificial Sequence: Synthetic epitope
NREISRAAGK

SEQ ID NO: 30934 - protein, 10 aa, Artificial Sequence
  Description of Artificial Sequence: Synthetic epitope
NREITNYRAR

SEQ ID NO: 30935 - protein, 10 aa, Artificial Sequence
  Description of Artificial Sequence: Synthetic epitope
NREKSLDKTE

SEQ ID NO: 30936 - protein, 10 aa, Artificial Sequence
  Description of Artificial Sequence: Synthetic epitope
NRERDALLSE

SEQ ID NO: 30937 - protein, 10 aa, Artificial Sequence
  Description of Artificial Sequence: Synthetic epitope
NREVIQSDSL

SEQ ID NO: 30938 - protein, 10 aa, Artificial Sequence
  Description of Artificial Sequence: Synthetic epitope
NRFASSKESA

SEQ ID NO: 30939 - protein, 10 aa, Artificial Sequence
  Description of Artificial Sequence: Synthetic epitope
NRFKEKENSE

SEQ ID NO: 30940 - protein, 10 aa, Artificial Sequence
  Description of Artificial Sequence: Synthetic epitope
NRFNKKYVKK

SEQ ID NO: 30941 - protein, 10 aa, Artificial Sequence
  Description of Artificial Sequence: Synthetic epitope
NRFNSELVHE

SEQ ID NO: 30942 - protein, 10 aa, Artificial Sequence
  Description of Artificial Sequence: Synthetic epitope
NRFQQKLRSV

SEQ ID NO: 30943 - protein, 10 aa, Artificial Sequence
  Description of Artificial Sequence: Synthetic epitope
NRFTKTSQGR

SEQ ID NO: 30944 - protein, 10 aa, Artificial Sequence
  Description of Artificial Sequence: Synthetic epitope
NRGKQDISER

SEQ ID NO: 30945 - protein, 10 aa, Artificial Sequence
  Description of Artificial Sequence: Synthetic epitope
NRGNIKRYGW

SEQ ID NO: 30946 - protein, 10 aa, Artificial Sequence
  Description of Artificial Sequence: Synthetic epitope
NRGSMTTNLD

SEQ ID NO: 30947 - protein, 10 aa, Artificial Sequence
  Description of Artificial Sequence: Synthetic epitope
NRGSQSSLEG

SEQ ID NO: 30948 - protein, 10 aa, Artificial Sequence
  Description of Artificial Sequence: Synthetic epitope
NRGTVIVERW

SEQ ID NO: 30949 - protein, 10 aa, Artificial Sequence
  Description of Artificial Sequence: Synthetic epitope
NRHAQGEKTA

SEQ ID NO: 30950 - protein, 10 aa, Artificial Sequence
  Description of Artificial Sequence: Synthetic epitope
NRHLDTLTEH

SEQ ID NO: 30951 - protein, 10 aa, Artificial Sequence
  Description of Artificial Sequence: Synthetic epitope
NRHNVIKRRN

SEQ ID NO: 30952 - protein, 10 aa, Artificial Sequence
  Description of Artificial Sequence: Synthetic epitope
NRIMALFDVW

SEQ ID NO: 30953 - protein, 10 aa, Artificial Sequence
  Description of Artificial Sequence: Synthetic epitope
NRINNVSLEE

SEQ ID NO: 30954 - protein, 10 aa, Artificial Sequence
  Description of Artificial Sequence: Synthetic epitope
NRIQRFIQNT

SEQ ID NO: 30955 - protein, 10 aa, Artificial Sequence
  Description of Artificial Sequence: Synthetic epitope
NRKAEGKATS

SEQ ID NO: 30956 - protein, 10 aa, Artificial Sequence
  Description of Artificial Sequence: Synthetic epitope
NRKAGEQSVL

SEQ ID NO: 30957 - protein, 10 aa, Artificial Sequence
  Description of Artificial Sequence: Synthetic epitope
NRKALKTERK

SEQ ID NO: 30958 - protein, 10 aa, Artificial Sequence
  Description of Artificial Sequence: Synthetic epitope
NRKGAVSELE

SEQ ID NO: 30959 - protein, 10 aa, Artificial Sequence
  Description of Artificial Sequence: Synthetic epitope
NRKMSSKSKK

SEQ ID NO: 30960 - protein, 10 aa, Artificial Sequence
  Description of Artificial Sequence: Synthetic epitope
NRKNTEGTQK

SEQ ID NO: 30961 - protein, 10 aa, Artificial Sequence
  Description of Artificial Sequence: Synthetic epitope
NRKSKEPKKE

SEQ ID NO: 30962 - protein, 10 aa, Artificial Sequence
  Description of Artificial Sequence: Synthetic epitope
NRLEKAQMKA

SEQ ID NO: 30963 - protein, 10 aa, Artificial Sequence
  Description of Artificial Sequence: Synthetic epitope
NRLEKTKVER

SEQ ID NO: 30964 - protein, 10 aa, Artificial Sequence
  Description of Artificial Sequence: Synthetic epitope
NRLEVAAKQA

SEQ ID NO: 30965 - protein, 10 aa, Artificial Sequence
  Description of Artificial Sequence: Synthetic epitope
NRLKTVLSAN

SEQ ID NO: 30966 - protein, 10 aa, Artificial Sequence
  Description of Artificial Sequence: Synthetic epitope
NRLLKILLEV

SEQ ID NO: 30967 - protein, 10 aa, Artificial Sequence
  Description of Artificial Sequence: Synthetic epitope
NRLLKQTSKT

SEQ ID NO: 30968 - protein, 10 aa, Artificial Sequence
  Description of Artificial Sequence: Synthetic epitope
NRLLMSLEEL

SEQ ID NO: 30969 - protein, 10 aa, Artificial Sequence
  Description of Artificial Sequence: Synthetic epitope
NRLLTMSFYR

SEQ ID NO: 30970 - protein, 10 aa, Artificial Sequence
  Description of Artificial Sequence: Synthetic epitope
NRLNVQEETM

SEQ ID NO: 30971 - protein, 10 aa, Artificial Sequence
  Description of Artificial Sequence: Synthetic epitope
NRLPLSSNAV

SEQ ID NO: 30972 - protein, 10 aa, Artificial Sequence
  Description of Artificial Sequence: Synthetic epitope
NRLRATGEDE

SEQ ID NO: 30973 - protein, 10 aa, Artificial Sequence
  Description of Artificial Sequence: Synthetic epitope
NRLRPVASGG

SEQ ID NO: 30974 - protein, 10 aa, Artificial Sequence
  Description of Artificial Sequence: Synthetic epitope
NRLRQKIQAE

SEQ ID NO: 30975 - protein, 10 aa, Artificial Sequence
  Description of Artificial Sequence: Synthetic epitope
NRLSLSEILS

SEQ ID NO: 30976 - protein, 10 aa, Artificial Sequence
  Description of Artificial Sequence: Synthetic epitope
NRLSNEVSRL

SEQ ID NO: 30977 - protein, 10 aa, Artificial Sequence
  Description of Artificial Sequence: Synthetic epitope
NRLTRATARK

SEQ ID NO: 30978 - protein, 10 aa, Artificial Sequence
  Description of Artificial Sequence: Synthetic epitope
NRMENVAKEV

SEQ ID NO: 30979 - protein, 10 aa, Artificial Sequence
  Description of Artificial Sequence: Synthetic epitope
NRMTQSQAQA

SEQ ID NO: 30980 - protein, 10 aa, Artificial Sequence
  Description of Artificial Sequence: Synthetic epitope
NRMVVERRSQ

SEQ ID NO: 30981 - protein, 10 aa, Artificial Sequence
  Description of Artificial Sequence: Synthetic epitope
NRNDAKEPKA

SEQ ID NO: 30982 - protein, 10 aa, Artificial Sequence
  Description of Artificial Sequence: Synthetic epitope
NRNKAILQLD

SEQ ID NO: 30983 - protein, 10 aa, Artificial Sequence
  Description of Artificial Sequence: Synthetic epitope
NRNKTGEITA

SEQ ID NO: 30984 - protein, 10 aa, Artificial Sequence
  Description of Artificial Sequence: Synthetic epitope
NRNSIENIAN

SEQ ID NO: 30985 - protein, 10 aa, Artificial Sequence
  Description of Artificial Sequence: Synthetic epitope
NRNVKIGKIT

SEQ ID NO: 30986 - protein, 10 aa, Artificial Sequence
  Description of Artificial Sequence: Synthetic epitope
NRPAIARGAA

SEQ ID NO: 30987 - protein, 10 aa, Artificial Sequence
  Description of Artificial Sequence: Synthetic epitope
NRPAVKAAQN

SEQ ID NO: 30988 - protein, 10 aa, Artificial Sequence
  Description of Artificial Sequence: Synthetic epitope
NRPETIRTKP

SEQ ID NO: 30989 - protein, 10 aa, Artificial Sequence
  Description of Artificial Sequence: Synthetic epitope
NRPKIAAFLP

SEQ ID NO: 30990 - protein, 10 aa, Artificial Sequence
  Description of Artificial Sequence: Synthetic epitope
NRPKRATAGK

SEQ ID NO: 30991 - protein, 10 aa, Artificial Sequence
  Description of Artificial Sequence: Synthetic epitope
NRPQAMSVTP

SEQ ID NO: 30992 - protein, 10 aa, Artificial Sequence
  Description of Artificial Sequence: Synthetic epitope
NRPQITILEQ

SEQ ID NO: 30993 - protein, 10 aa, Artificial Sequence
  Description of Artificial Sequence: Synthetic epitope
NRPYTSLVPP

SEQ ID NO: 30994 - protein, 10 aa, Artificial Sequence
  Description of Artificial Sequence: Synthetic epitope
NRQAAKLSKP

SEQ ID NO: 30995 - protein, 10 aa, Artificial Sequence
  Description of Artificial Sequence: Synthetic epitope
NRQAKFAATP

SEQ ID NO: 30996 - protein, 10 aa, Artificial Sequence
  Description of Artificial Sequence: Synthetic epitope
NRQFSYLIEN

SEQ ID NO: 30997 - protein, 10 aa, Artificial Sequence
  Description of Artificial Sequence: Synthetic epitope
NRQIEITSDM

SEQ ID NO: 30998 - protein, 10 aa, Artificial Sequence
  Description of Artificial Sequence: Synthetic epitope
NRQNEFLTRL

SEQ ID NO: 30999 - protein, 10 aa, Artificial Sequence
  Description of Artificial Sequence: Synthetic epitope
NRQQSAQLEQ

SEQ ID NO: 31000 - protein, 10 aa, Artificial Sequence
  Description of Artificial Sequence: Synthetic epitope
NRQSQVLING

SEQ ID NO: 31001 - protein, 10 aa, Artificial Sequence
  Description of Artificial Sequence: Synthetic epitope
NRQTNVLSKP

SEQ ID NO: 31002 - protein, 10 aa, Artificial Sequence
  Description of Artificial Sequence: Synthetic epitope
NRQTRLNARI

SEQ ID NO: 31003 - protein, 10 aa, Artificial Sequence
  Description of Artificial Sequence: Synthetic epitope
NRQTSTKGQV

SEQ ID NO: 31004 - protein, 10 aa, Artificial Sequence
  Description of Artificial Sequence: Synthetic epitope
NRQVSSPSFT

SEQ ID NO: 31005 - protein, 10 aa, Artificial Sequence
  Description of Artificial Sequence: Synthetic epitope
NRRAAKASHM

SEQ ID NO: 31006 - protein, 10 aa, Artificial Sequence
  Description of Artificial Sequence: Synthetic epitope
NRRADRVPIS

SEQ ID NO: 31007 - protein, 10 aa, Artificial Sequence
  Description of Artificial Sequence: Synthetic epitope
NRRHFSAPQK

SEQ ID NO: 31008 - protein, 10 aa, Artificial Sequence
  Description of Artificial Sequence: Synthetic epitope
NRRHRMPGYE

SEQ ID NO: 31009 - protein, 10 aa, Artificial Sequence
  Description of Artificial Sequence: Synthetic epitope
NRRKEALLKE

SEQ ID NO: 31010 - protein, 10 aa, Artificial Sequence
  Description of Artificial Sequence: Synthetic epitope
NRRKKVASNV

SEQ ID NO: 31011 - protein, 10 aa, Artificial Sequence
  Description of Artificial Sequence: Synthetic epitope
NRRNARKVGG

SEQ ID NO: 31012 - protein, 10 aa, Artificial Sequence
  Description of Artificial Sequence: Synthetic epitope
NRRQTLKNTS

SEQ ID NO: 31013 - protein, 10 aa, Artificial Sequence
  Description of Artificial Sequence: Synthetic epitope
NRRVSANDIM

SEQ ID NO: 31014 - protein, 10 aa, Artificial Sequence
  Description of Artificial Sequence: Synthetic epitope
NRRYIISGDT

SEQ ID NO: 31015 - protein, 10 aa, Artificial Sequence
  Description of Artificial Sequence: Synthetic epitope
NRSESIRPDE

SEQ ID NO: 31016 - protein, 10 aa, Artificial Sequence
  Description of Artificial Sequence: Synthetic epitope
NRSFLEVSEM

SEQ ID NO: 31017 - protein, 10 aa, Artificial Sequence
  Description of Artificial Sequence: Synthetic epitope
NRSFNSDSPS

SEQ ID NO: 31018 - protein, 10 aa, Artificial Sequence
  Description of Artificial Sequence: Synthetic epitope
NRSFNVFRQM

SEQ ID NO: 31019 - protein, 10 aa, Artificial Sequence
  Description of Artificial Sequence: Synthetic epitope
NRSGPSQMAL

SEQ ID NO: 31020 - protein, 10 aa, Artificial Sequence
  Description of Artificial Sequence: Synthetic epitope
NRSIHTAWLI

SEQ ID NO: 31021 - protein, 10 aa, Artificial Sequence
  Description of Artificial Sequence: Synthetic epitope
NRSKLSNVAR

SEQ ID NO: 31022 - protein, 10 aa, Artificial Sequence
  Description of Artificial Sequence: Synthetic epitope
NRSLTQSRTD

SEQ ID NO: 31023 - protein, 10 aa, Artificial Sequence
  Description of Artificial Sequence: Synthetic epitope
NRSMDTYSKM

SEQ ID NO: 31024 - protein, 10 aa, Artificial Sequence
  Description of Artificial Sequence: Synthetic epitope
NRSMSVDLSH

SEQ ID NO: 31025 - protein, 10 aa, Artificial Sequence
  Description of Artificial Sequence: Synthetic epitope
NRSNIQERDG

SEQ ID NO: 31026 - protein, 10 aa, Artificial Sequence
  Description of Artificial Sequence: Synthetic epitope
NRSSASAPPT

SEQ ID NO: 31027 - protein, 10 aa, Artificial Sequence
  Description of Artificial Sequence: Synthetic epitope
NRSTEIVSME

SEQ ID NO: 31028 - protein, 10 aa, Artificial Sequence
  Description of Artificial Sequence: Synthetic epitope
NRSTKFQQIV

SEQ ID NO: 31029 - protein, 10 aa, Artificial Sequence
  Description of Artificial Sequence: Synthetic epitope
NRSTSQPESV

SEQ ID NO: 31030 - protein, 10 aa, Artificial Sequence
  Description of Artificial Sequence: Synthetic epitope
NRSVVSDRDQ

SEQ ID NO: 31031 - protein, 10 aa, Artificial Sequence
  Description of Artificial Sequence: Synthetic epitope
NRTEISSKLQ

SEQ ID NO: 31032 - protein, 10 aa, Artificial Sequence
  Description of Artificial Sequence: Synthetic epitope
NRTGSEMLQE

SEQ ID NO: 31033 - protein, 10 aa, Artificial Sequence
  Description of Artificial Sequence: Synthetic epitope
NRTGSVEAQT

SEQ ID NO: 31034 - protein, 10 aa, Artificial Sequence
  Description of Artificial Sequence: Synthetic epitope
NRTIQMIIRD

SEQ ID NO: 31035 - protein, 10 aa, Artificial Sequence
  Description of Artificial Sequence: Synthetic epitope
NRTNLQRLAI

SEQ ID NO: 31036 - protein, 10 aa, Artificial Sequence
  Description of Artificial Sequence: Synthetic epitope
NRTQAFQEQE

SEQ ID NO: 31037 - protein, 10 aa, Artificial Sequence
  Description of Artificial Sequence: Synthetic epitope
NRTSITSQLM

SEQ ID NO: 31038 - protein, 10 aa, Artificial Sequence
  Description of Artificial Sequence: Synthetic epitope
NRTSNSKTSS

SEQ ID NO: 31039 - protein, 10 aa, Artificial Sequence
  Description of Artificial Sequence: Synthetic epitope
NRTTKDDPKG

SEQ ID NO: 31040 - protein, 10 aa, Artificial Sequence
  Description of Artificial Sequence: Synthetic epitope
NRVAEVKAEG

SEQ ID NO: 31041 - protein, 10 aa, Artificial Sequence
  Description of Artificial Sequence: Synthetic epitope
NRVAEVKAEG

SEQ ID NO: 31042 - protein, 10 aa, Artificial Sequence
  Description of Artificial Sequence: Synthetic epitope
NRVEQASVRI

SEQ ID NO: 31043 - protein, 10 aa, Artificial Sequence
  Description of Artificial Sequence: Synthetic epitope
NRVGMVETNS

SEQ ID NO: 31044 - protein, 10 aa, Artificial Sequence
  Description of Artificial Sequence: Synthetic epitope
NRVIKLLEET

SEQ ID NO: 31045 - protein, 10 aa, Artificial Sequence
  Description of Artificial Sequence: Synthetic epitope
NRVIVPSSEI

SEQ ID NO: 31046 - protein, 10 aa, Artificial Sequence
  Description of Artificial Sequence: Synthetic epitope
NRVIVPSSEI

SEQ ID NO: 31047 - protein, 10 aa, Artificial Sequence
  Description of Artificial Sequence: Synthetic epitope
NRVMMVAKKF

SEQ ID NO: 31048 - protein, 10 aa, Artificial Sequence
  Description of Artificial Sequence: Synthetic epitope
NRVTNFVAQR

SEQ ID NO: 31049 - protein, 10 aa, Artificial Sequence
  Description of Artificial Sequence: Synthetic epitope
NRVTSNDSAI

SEQ ID NO: 31050 - protein, 10 aa, Artificial Sequence
  Description of Artificial Sequence: Synthetic epitope
NRYETNEEDK

SEQ ID NO: 31051 - protein, 10 aa, Artificial Sequence
  Description of Artificial Sequence: Synthetic epitope
NRYIVQVSPL

SEQ ID NO: 31052 - protein, 10 aa, Artificial Sequence
  Description of Artificial Sequence: Synthetic epitope
NRYKQSRDIS

SEQ ID NO: 31053 - protein, 10 aa, Artificial Sequence
  Description of Artificial Sequence: Synthetic epitope
NRYNADKPSA

SEQ ID NO: 31054 - protein, 10 aa, Artificial Sequence
  Description of Artificial Sequence: Synthetic epitope
NRYSSNIQMQ

SEQ ID NO: 31055 - protein, 10 aa, Artificial Sequence
  Description of Artificial Sequence: Synthetic epitope
NRYSSRRKQL

SEQ ID NO: 31056 - protein, 10 aa, Artificial Sequence
  Description of Artificial Sequence: Synthetic epitope
NSAANASATT

SEQ ID NO: 31057 - protein, 10 aa, Artificial Sequence
  Description of Artificial Sequence: Synthetic epitope
NSAELIAEIS

SEQ ID NO: 31058 - protein, 10 aa, Artificial Sequence
  Description of Artificial Sequence: Synthetic epitope
NSAGAQDRIG

SEQ ID NO: 31059 - protein, 10 aa, Artificial Sequence
  Description of Artificial Sequence: Synthetic epitope
NSAGASAQEE

SEQ ID NO: 31060 - protein, 10 aa, Artificial Sequence
  Description of Artificial Sequence: Synthetic epitope
NSAGASAQEE

SEQ ID NO: 31061 - protein, 10 aa, Artificial Sequence
  Description of Artificial Sequence: Synthetic epitope
NSAIQVLESS

SEQ ID NO: 31062 - protein, 10 aa, Artificial Sequence
  Description of Artificial Sequence: Synthetic epitope
NSALKKAVGG

SEQ ID NO: 31063 - protein, 10 aa, Artificial Sequence
  Description of Artificial Sequence: Synthetic epitope
NSALSESSAA

SEQ ID NO: 31064 - protein, 10 aa, Artificial Sequence
  Description of Artificial Sequence: Synthetic epitope
NSANGATTQV

SEQ ID NO: 31065 - protein, 10 aa, Artificial Sequence
  Description of Artificial Sequence: Synthetic epitope
NSAQEDKKSK

SEQ ID NO: 31066 - protein, 10 aa, Artificial Sequence
  Description of Artificial Sequence: Synthetic epitope
NSAQIVAVNN

SEQ ID NO: 31067 - protein, 10 aa, Artificial Sequence
  Description of Artificial Sequence: Synthetic epitope
NSARIGAVKR

SEQ ID NO: 31068 - protein, 10 aa, Artificial Sequence
  Description of Artificial Sequence: Synthetic epitope
NSASANSSGG

SEQ ID NO: 31069 - protein, 10 aa, Artificial Sequence
  Description of Artificial Sequence: Synthetic epitope
NSASFSQASG

SEQ ID NO: 31070 - protein, 10 aa, Artificial Sequence
  Description of Artificial Sequence: Synthetic epitope
NSASVTVSPA

SEQ ID NO: 31071 - protein, 10 aa, Artificial Sequence
  Description of Artificial Sequence: Synthetic epitope
NSATSSQSKK

SEQ ID NO: 31072 - protein, 10 aa, Artificial Sequence
  Description of Artificial Sequence: Synthetic epitope
NSAVTAPASN

SEQ ID NO: 31073 - protein, 10 aa, Artificial Sequence
  Description of Artificial Sequence: Synthetic epitope
NSDHLMQIQK

SEQ ID NO: 31074 - protein, 10 aa, Artificial Sequence
  Description of Artificial Sequence: Synthetic epitope
NSDLQDSAQN

SEQ ID NO: 31075 - protein, 10 aa, Artificial Sequence
  Description of Artificial Sequence: Synthetic epitope
NSDLSSVKLL

SEQ ID NO: 31076 - protein, 10 aa, Artificial Sequence
  Description of Artificial Sequence: Synthetic epitope
NSDLWVANIE

SEQ ID NO: 31077 - protein, 10 aa, Artificial Sequence
  Description of Artificial Sequence: Synthetic epitope
NSDMAQMSTE

SEQ ID NO: 31078 - protein, 10 aa, Artificial Sequence
  Description of Artificial Sequence: Synthetic epitope
NSDQRQVETS

SEQ ID NO: 31079 - protein, 10 aa, Artificial Sequence
  Description of Artificial Sequence: Synthetic epitope
NSDQSSEKNR

SEQ ID NO: 31080 - protein, 10 aa, Artificial Sequence
  Description of Artificial Sequence: Synthetic epitope
NSDRVLVLQA

SEQ ID NO: 31081 - protein, 10 aa, Artificial Sequence
  Description of Artificial Sequence: Synthetic epitope
NSDSGENKEE

SEQ ID NO: 31082 - protein, 10 aa, Artificial Sequence
  Description of Artificial Sequence: Synthetic epitope
NSDSLQSLKE

SEQ ID NO: 31083 - protein, 10 aa, Artificial Sequence
  Description of Artificial Sequence: Synthetic epitope
NSDSSETTDL

SEQ ID NO: 31084 - protein, 10 aa, Artificial Sequence
  Description of Artificial Sequence: Synthetic epitope
NSDTKTRTAS

SEQ ID NO: 31085 - protein, 10 aa, Artificial Sequence
  Description of Artificial Sequence: Synthetic epitope
NSDTNRAPQN

SEQ ID NO: 31086 - protein, 10 aa, Artificial Sequence
  Description of Artificial Sequence: Synthetic epitope
NSEAMILDKN

SEQ ID NO: 31087 - protein, 10 aa, Artificial Sequence
  Description of Artificial Sequence: Synthetic epitope
NSEASLLSAD

SEQ ID NO: 31088 - protein, 10 aa, Artificial Sequence
  Description of Artificial Sequence: Synthetic epitope
NSEIAKLNLK

SEQ ID NO: 31089 - protein, 10 aa, Artificial Sequence
  Description of Artificial Sequence: Synthetic epitope
NSEKIKEAAD

SEQ ID NO: 31090 - protein, 10 aa, Artificial Sequence
  Description of Artificial Sequence: Synthetic epitope
NSEKSKFQQH

SEQ ID NO: 31091 - protein, 10 aa, Artificial Sequence
  Description of Artificial Sequence: Synthetic epitope
NSEQSQALQH

SEQ ID NO: 31092 - protein, 10 aa, Artificial Sequence
  Description of Artificial Sequence: Synthetic epitope
NSERAEVQRL

SEQ ID NO: 31093 - protein, 10 aa, Artificial Sequence
  Description of Artificial Sequence: Synthetic epitope
NSESEDYSPS

SEQ ID NO: 31094 - protein, 10 aa, Artificial Sequence
  Description of Artificial Sequence: Synthetic epitope
NSESETRERR

SEQ ID NO: 31095 - protein, 10 aa, Artificial Sequence
  Description of Artificial Sequence: Synthetic epitope
NSESKSSITE

SEQ ID NO: 31096 - protein, 10 aa, Artificial Sequence
  Description of Artificial Sequence: Synthetic epitope
NSESNFARAY

SEQ ID NO: 31097 - protein, 10 aa, Artificial Sequence
  Description of Artificial Sequence: Synthetic epitope
NSETATKEGI

SEQ ID NO: 31098 - protein, 10 aa, Artificial Sequence
  Description of Artificial Sequence: Synthetic epitope
NSETKVQTAK

SEQ ID NO: 31099 - protein, 10 aa, Artificial Sequence
  Description of Artificial Sequence: Synthetic epitope
NSEVSEAKEG

SEQ ID NO: 31100 - protein, 10 aa, Artificial Sequence
  Description of Artificial Sequence: Synthetic epitope
NSEYRDTTRR

SEQ ID NO: 31101 - protein, 10 aa, Artificial Sequence
  Description of Artificial Sequence: Synthetic epitope
NSFASGEVTT

SEQ ID NO: 31102 - protein, 10 aa, Artificial Sequence
  Description of Artificial Sequence: Synthetic epitope
NSFFSVSHNI

SEQ ID NO: 31103 - protein, 10 aa, Artificial Sequence
  Description of Artificial Sequence: Synthetic epitope
NSFHSSIEAI

SEQ ID NO: 31104 - protein, 10 aa, Artificial Sequence
  Description of Artificial Sequence: Synthetic epitope
NSFRNEISPR

SEQ ID NO: 31105 - protein, 10 aa, Artificial Sequence
  Description of Artificial Sequence: Synthetic epitope
NSFVTDIFER

SEQ ID NO: 31106 - protein, 10 aa, Artificial Sequence
  Description of Artificial Sequence: Synthetic epitope
NSGDAVDLER

SEQ ID NO: 31107 - protein, 10 aa, Artificial Sequence
  Description of Artificial Sequence: Synthetic epitope
NSGGVDIPQE

SEQ ID NO: 31108 - protein, 10 aa, Artificial Sequence
  Description of Artificial Sequence: Synthetic epitope
NSGKLGTTVK

SEQ ID NO: 31109 - protein, 10 aa, Artificial Sequence
  Description of Artificial Sequence: Synthetic epitope
NSGKQSNSGA

SEQ ID NO: 31110 - protein, 10 aa, Artificial Sequence
  Description of Artificial Sequence: Synthetic epitope
NSGLEKTEAI

SEQ ID NO: 31111 - protein, 10 aa, Artificial Sequence
  Description of Artificial Sequence: Synthetic epitope
NSGNAKEKSL

SEQ ID NO: 31112 - protein, 10 aa, Artificial Sequence
  Description of Artificial Sequence: Synthetic epitope
NSGSAAEQEQ

SEQ ID NO: 31113 - protein, 10 aa, Artificial Sequence
  Description of Artificial Sequence: Synthetic epitope
NSGSEVWYSN

SEQ ID NO: 31114 - protein, 10 aa, Artificial Sequence
  Description of Artificial Sequence: Synthetic epitope
NSHAHTGSSD

SEQ ID NO: 31115 - protein, 10 aa, Artificial Sequence
  Description of Artificial Sequence: Synthetic epitope
NSHEAVLKLQ

SEQ ID NO: 31116 - protein, 10 aa, Artificial Sequence
  Description of Artificial Sequence: Synthetic epitope
NSHEGKRDYV

SEQ ID NO: 31117 - protein, 10 aa, Artificial Sequence
  Description of Artificial Sequence: Synthetic epitope
NSHEKMTGEN

SEQ ID NO: 31118 - protein, 10 aa, Artificial Sequence
  Description of Artificial Sequence: Synthetic epitope
NSHFEYQNTK

SEQ ID NO: 31119 - protein, 10 aa, Artificial Sequence
  Description of Artificial Sequence: Synthetic epitope
NSHINSATNQ

SEQ ID NO: 31120 - protein, 10 aa, Artificial Sequence
  Description of Artificial Sequence: Synthetic epitope
NSHQMGQSKQ

SEQ ID NO: 31121 - protein, 10 aa, Artificial Sequence
  Description of Artificial Sequence: Synthetic epitope
NSHSQSTRVL

SEQ ID NO: 31122 - protein, 10 aa, Artificial Sequence
  Description of Artificial Sequence: Synthetic epitope
NSIAAGVLQQ

SEQ ID NO: 31123 - protein, 10 aa, Artificial Sequence
  Description of Artificial Sequence: Synthetic epitope
NSIAELVAST

SEQ ID NO: 31124 - protein, 10 aa, Artificial Sequence
  Description of Artificial Sequence: Synthetic epitope
NSIKMEASKR

SEQ ID NO: 31125 - protein, 10 aa, Artificial Sequence
  Description of Artificial Sequence: Synthetic epitope
NSILGQLKAE

SEQ ID NO: 31126 - protein, 10 aa, Artificial Sequence
  Description of Artificial Sequence: Synthetic epitope
NSILSYSPSY

SEQ ID NO: 31127 - protein, 10 aa, Artificial Sequence
  Description of Artificial Sequence: Synthetic epitope
NSINKTLKQD

SEQ ID NO: 31128 - protein, 10 aa, Artificial Sequence
  Description of Artificial Sequence: Synthetic epitope
NSISKAKAAR

SEQ ID NO: 31129 - protein, 10 aa, Artificial Sequence
  Description of Artificial Sequence: Synthetic epitope
NSISSESIVQ

SEQ ID NO: 31130 - protein, 10 aa, Artificial Sequence
  Description of Artificial Sequence: Synthetic epitope
NSIVMSSEDD

SEQ ID NO: 31131 - protein, 10 aa, Artificial Sequence
  Description of Artificial Sequence: Synthetic epitope
NSKAPLSKSA

SEQ ID NO: 31132 - protein, 10 aa, Artificial Sequence
  Description of Artificial Sequence: Synthetic epitope
NSKASTVGTY

SEQ ID NO: 31133 - protein, 10 aa, Artificial Sequence
  Description of Artificial Sequence: Synthetic epitope
NSKDAAKEAG

SEQ ID NO: 31134 - protein, 10 aa, Artificial Sequence
  Description of Artificial Sequence: Synthetic epitope
NSKDSETHKA

SEQ ID NO: 31135 - protein, 10 aa, Artificial Sequence
  Description of Artificial Sequence: Synthetic epitope
NSKEVAQAKK

SEQ ID NO: 31136 - protein, 10 aa, Artificial Sequence
  Description of Artificial Sequence: Synthetic epitope
NSKFKSTVKK

SEQ ID NO: 31137 - protein, 10 aa, Artificial Sequence
  Description of Artificial Sequence: Synthetic epitope
NSKGGVTTQA

SEQ ID NO: 31138 - protein, 10 aa, Artificial Sequence
  Description of Artificial Sequence: Synthetic epitope
NSKGKKAIRR

SEQ ID NO: 31139 - protein, 10 aa, Artificial Sequence
  Description of Artificial Sequence: Synthetic epitope
NSKGSNSEID

SEQ ID NO: 31140 - protein, 10 aa, Artificial Sequence
  Description of Artificial Sequence: Synthetic epitope
NSKIGSSAPT

SEQ ID NO: 31141 - protein, 10 aa, Artificial Sequence
  Description of Artificial Sequence: Synthetic epitope
NSKILSVMEA

SEQ ID NO: 31142 - protein, 10 aa, Artificial Sequence
  Description of Artificial Sequence: Synthetic epitope
NSKKEIVDRK

SEQ ID NO: 31143 - protein, 10 aa, Artificial Sequence
  Description of Artificial Sequence: Synthetic epitope
NSKKNQMYFD

SEQ ID NO: 31144 - protein, 10 aa, Artificial Sequence
  Description of Artificial Sequence: Synthetic epitope
NSKLESLLEE

SEQ ID NO: 31145 - protein, 10 aa, Artificial Sequence
  Description of Artificial Sequence: Synthetic epitope
NSKLKSGNSA

SEQ ID NO: 31146 - protein, 10 aa, Artificial Sequence
  Description of Artificial Sequence: Synthetic epitope
NSKMDVRAKR

SEQ ID NO: 31147 - protein, 10 aa, Artificial Sequence
  Description of Artificial Sequence: Synthetic epitope
NSKNFDREIG

SEQ ID NO: 31148 - protein, 10 aa, Artificial Sequence
  Description of Artificial Sequence: Synthetic epitope
NSKNSKSPEE

SEQ ID NO: 31149 - protein, 10 aa, Artificial Sequence
  Description of Artificial Sequence: Synthetic epitope
NSKQNRVIYK

SEQ ID NO: 31150 - protein, 10 aa, Artificial Sequence
  Description of Artificial Sequence: Synthetic epitope
NSKQSQDEPL

SEQ ID NO: 31151 - protein, 10 aa, Artificial Sequence
  Description of Artificial Sequence: Synthetic epitope
NSKRAREKRD

SEQ ID NO: 31152 - protein, 10 aa, Artificial Sequence
  Description of Artificial Sequence: Synthetic epitope
NSKRMMNAIK

SEQ ID NO: 31153 - protein, 10 aa, Artificial Sequence
  Description of Artificial Sequence: Synthetic epitope
NSKRQEVAMM

SEQ ID NO: 31154 - protein, 10 aa, Artificial Sequence
  Description of Artificial Sequence: Synthetic epitope
NSKSAEQLTN

SEQ ID NO: 31155 - protein, 10 aa, Artificial Sequence
  Description of Artificial Sequence: Synthetic epitope
NSKSTRSSVK

SEQ ID NO: 31156 - protein, 10 aa, Artificial Sequence
  Description of Artificial Sequence: Synthetic epitope
NSKTEILINI

SEQ ID NO: 31157 - protein, 10 aa, Artificial Sequence
  Description of Artificial Sequence: Synthetic epitope
NSKTEQSVTP

SEQ ID NO: 31158 - protein, 10 aa, Artificial Sequence
  Description of Artificial Sequence: Synthetic epitope
NSKTKAEDVK

SEQ ID NO: 31159 - protein, 10 aa, Artificial Sequence
  Description of Artificial Sequence: Synthetic epitope
NSKTKGAQKD

SEQ ID NO: 31160 - protein, 10 aa, Artificial Sequence
  Description of Artificial Sequence: Synthetic epitope
NSKTTKELDK

SEQ ID NO: 31161 - protein, 10 aa, Artificial Sequence
  Description of Artificial Sequence: Synthetic epitope
NSKTVKNTSR

SEQ ID NO: 31162 - protein, 10 aa, Artificial Sequence
  Description of Artificial Sequence: Synthetic epitope
NSKVAVGQEQ

SEQ ID NO: 31163 - protein, 10 aa, Artificial Sequence
  Description of Artificial Sequence: Synthetic epitope
NSKVKSHVTI

SEQ ID NO: 31164 - protein, 10 aa, Artificial Sequence
  Description of Artificial Sequence: Synthetic epitope
NSKVRMNGKT

SEQ ID NO: 31165 - protein, 10 aa, Artificial Sequence
  Description of Artificial Sequence: Synthetic epitope
NSKVSKVKPK

SEQ ID NO: 31166 - protein, 10 aa, Artificial Sequence
  Description of Artificial Sequence: Synthetic epitope
NSKVTGKDSD

SEQ ID NO: 31167 - protein, 10 aa, Artificial Sequence
  Description of Artificial Sequence: Synthetic epitope
NSLAEKAAVA

SEQ ID NO: 31168 - protein, 10 aa, Artificial Sequence
  Description of Artificial Sequence: Synthetic epitope
NSLAQLTFNQ

SEQ ID NO: 31169 - protein, 10 aa, Artificial Sequence
  Description of Artificial Sequence: Synthetic epitope
NSLDGSTSSV

SEQ ID NO: 31170 - protein, 10 aa, Artificial Sequence
  Description of Artificial Sequence: Synthetic epitope
NSLETATSTE

SEQ ID NO: 31171 - protein, 10 aa, Artificial Sequence
  Description of Artificial Sequence: Synthetic epitope
NSLISGLSQD

SEQ ID NO: 31172 - protein, 10 aa, Artificial Sequence
  Description of Artificial Sequence: Synthetic epitope
NSLKRRLSTR

SEQ ID NO: 31173 - protein, 10 aa, Artificial Sequence
  Description of Artificial Sequence: Synthetic epitope
NSLLEESQSS

SEQ ID NO: 31174 - protein, 10 aa, Artificial Sequence
  Description of Artificial Sequence: Synthetic epitope
NSLLEVFIEF

SEQ ID NO: 31175 - protein, 10 aa, Artificial Sequence
  Description of Artificial Sequence: Synthetic epitope
NSLLKIIEKA

SEQ ID NO: 31176 - protein, 10 aa, Artificial Sequence
  Description of Artificial Sequence: Synthetic epitope
NSLNEKSIED

SEQ ID NO: 31177 - protein, 10 aa, Artificial Sequence
  Description of Artificial Sequence: Synthetic epitope
NSLNKTKSKL

SEQ ID NO: 31178 - protein, 10 aa, Artificial Sequence
  Description of Artificial Sequence: Synthetic epitope
NSLNLASSEN

SEQ ID NO: 31179 - protein, 10 aa, Artificial Sequence
  Description of Artificial Sequence: Synthetic epitope
NSLRSLTTVG

SEQ ID NO: 31180 - protein, 10 aa, Artificial Sequence
  Description of Artificial Sequence: Synthetic epitope
NSLSRGKKAS

SEQ ID NO: 31181 - protein, 10 aa, Artificial Sequence
  Description of Artificial Sequence: Synthetic epitope
NSLSSKLPEP

SEQ ID NO: 31182 - protein, 10 aa, Artificial Sequence
  Description of Artificial Sequence: Synthetic epitope
NSLSSNVPSE

SEQ ID NO: 31183 - protein, 10 aa, Artificial Sequence
  Description of Artificial Sequence: Synthetic epitope
NSLSTSDTSQ

SEQ ID NO: 31184 - protein, 10 aa, Artificial Sequence
  Description of Artificial Sequence: Synthetic epitope
NSLSVPSVSK

SEQ ID NO: 31185 - protein, 10 aa, Artificial Sequence
  Description of Artificial Sequence: Synthetic epitope
NSLTRSHQAT

SEQ ID NO: 31186 - protein, 10 aa, Artificial Sequence
  Description of Artificial Sequence: Synthetic epitope
NSLVAQLQAM

SEQ ID NO: 31187 - protein, 10 aa, Artificial Sequence
  Description of Artificial Sequence: Synthetic epitope
NSLVSVGVEA

SEQ ID NO: 31188 - protein, 10 aa, Artificial Sequence
  Description of Artificial Sequence: Synthetic epitope
NSMALSTKDA

SEQ ID NO: 31189 - protein, 10 aa, Artificial Sequence
  Description of Artificial Sequence: Synthetic epitope
NSMEETLMQI

SEQ ID NO: 31190 - protein, 10 aa, Artificial Sequence
  Description of Artificial Sequence: Synthetic epitope
NSMINKSSFS

SEQ ID NO: 31191 - protein, 10 aa, Artificial Sequence
  Description of Artificial Sequence: Synthetic epitope
NSMLTKDIEI

SEQ ID NO: 31192 - protein, 10 aa, Artificial Sequence
  Description of Artificial Sequence: Synthetic epitope
NSMPTLERFP

SEQ ID NO: 31193 - protein, 10 aa, Artificial Sequence
  Description of Artificial Sequence: Synthetic epitope
NSMQTEGKKI

SEQ ID NO: 31194 - protein, 10 aa, Artificial Sequence
  Description of Artificial Sequence: Synthetic epitope
NSMRADSVSS

SEQ ID NO: 31195 - protein, 10 aa, Artificial Sequence
  Description of Artificial Sequence: Synthetic epitope
NSMSSNIDYD

SEQ ID NO: 31196 - protein, 10 aa, Artificial Sequence
  Description of Artificial Sequence: Synthetic epitope
NSMSSVASGA

SEQ ID NO: 31197 - protein, 10 aa, Artificial Sequence
  Description of Artificial Sequence: Synthetic epitope
NSMTSSERNI

SEQ ID NO: 31198 - protein, 10 aa, Artificial Sequence
  Description of Artificial Sequence: Synthetic epitope
NSMVSMQDDA

SEQ ID NO: 31199 - protein, 10 aa, Artificial Sequence
  Description of Artificial Sequence: Synthetic epitope
NSMVSNTLAK

SEQ ID NO: 31200 - protein, 10 aa, Artificial Sequence
  Description of Artificial Sequence: Synthetic epitope
NSMYLSSTEP

SEQ ID NO: 31201 - protein, 10 aa, Artificial Sequence
  Description of Artificial Sequence: Synthetic epitope
NSNANKNAVE

SEQ ID NO: 31202 - protein, 10 aa, Artificial Sequence
  Description of Artificial Sequence: Synthetic epitope
NSNAQVLSGT

SEQ ID NO: 31203 - protein, 10 aa, Artificial Sequence
  Description of Artificial Sequence: Synthetic epitope
NSNKQKMKYD

SEQ ID NO: 31204 - protein, 10 aa, Artificial Sequence
  Description of Artificial Sequence: Synthetic epitope
NSNLPIASIS

SEQ ID NO: 31205 - protein, 10 aa, Artificial Sequence
  Description of Artificial Sequence: Synthetic epitope
NSNMPQSLKV

SEQ ID NO: 31206 - protein, 10 aa, Artificial Sequence
  Description of Artificial Sequence: Synthetic epitope
NSNNGTSTAT

SEQ ID NO: 31207 - protein, 10 aa, Artificial Sequence
  Description of Artificial Sequence: Synthetic epitope
NSNPLLSSKS

SEQ ID NO: 31208 - protein, 10 aa, Artificial Sequence
  Description of Artificial Sequence: Synthetic epitope
NSNRDKEIKK

SEQ ID NO: 31209 - protein, 10 aa, Artificial Sequence
  Description of Artificial Sequence: Synthetic epitope
NSNSKILNVK

SEQ ID NO: 31210 - protein, 10 aa, Artificial Sequence
  Description of Artificial Sequence: Synthetic epitope
NSNTRPSSAT

SEQ ID NO: 31211 - protein, 10 aa, Artificial Sequence
  Description of Artificial Sequence: Synthetic epitope
NSNTSKQRYS

SEQ ID NO: 31212 - protein, 10 aa, Artificial Sequence
  Description of Artificial Sequence: Synthetic epitope
NSPANQSRGN

SEQ ID NO: 31213 - protein, 10 aa, Artificial Sequence
  Description of Artificial Sequence: Synthetic epitope
NSPPSPSSMN

SEQ ID NO: 31214 - protein, 10 aa, Artificial Sequence
  Description of Artificial Sequence: Synthetic epitope
NSPSVSGELA

SEQ ID NO: 31215 - protein, 10 aa, Artificial Sequence
  Description of Artificial Sequence: Synthetic epitope
NSPTAIKETL

SEQ ID NO: 31216 - protein, 10 aa, Artificial Sequence
  Description of Artificial Sequence: Synthetic epitope
NSPVNSSKQP

SEQ ID NO: 31217 - protein, 10 aa, Artificial Sequence
  Description of Artificial Sequence: Synthetic epitope
NSQARLSSMV

SEQ ID NO: 31218 - protein, 10 aa, Artificial Sequence
  Description of Artificial Sequence: Synthetic epitope
NSQASESRQD

SEQ ID NO: 31219 - protein, 10 aa, Artificial Sequence
  Description of Artificial Sequence: Synthetic epitope
NSQKAVLSTD

SEQ ID NO: 31220 - protein, 10 aa, Artificial Sequence
  Description of Artificial Sequence: Synthetic epitope
NSQKINKNVN

SEQ ID NO: 31221 - protein, 10 aa, Artificial Sequence
  Description of Artificial Sequence: Synthetic epitope
NSQNILTVSA

SEQ ID NO: 31222 - protein, 10 aa, Artificial Sequence
  Description of Artificial Sequence: Synthetic epitope
NSQNVSKADN

SEQ ID NO: 31223 - protein, 10 aa, Artificial Sequence
  Description of Artificial Sequence: Synthetic epitope
NSQQTISDRY

SEQ ID NO: 31224 - protein, 10 aa, Artificial Sequence
  Description of Artificial Sequence: Synthetic epitope
NSQSKRTIEG

SEQ ID NO: 31225 - protein, 10 aa, Artificial Sequence
  Description of Artificial Sequence: Synthetic epitope
NSQSKVDWGK

SEQ ID NO: 31226 - protein, 10 aa, Artificial Sequence
  Description of Artificial Sequence: Synthetic epitope
NSQSSIDQKL

SEQ ID NO: 31227 - protein, 10 aa, Artificial Sequence
  Description of Artificial Sequence: Synthetic epitope
NSQSSIDQKL

SEQ ID NO: 31228 - protein, 10 aa, Artificial Sequence
  Description of Artificial Sequence: Synthetic epitope
NSQSSIDQKL

SEQ ID NO: 31229 - protein, 10 aa, Artificial Sequence
  Description of Artificial Sequence: Synthetic epitope
NSQSSIDQKL

SEQ ID NO: 31230 - protein, 10 aa, Artificial Sequence
  Description of Artificial Sequence: Synthetic epitope
NSQSSIDQKL

SEQ ID NO: 31231 - protein, 10 aa, Artificial Sequence
  Description of Artificial Sequence: Synthetic epitope
NSQSSIDQKL

SEQ ID NO: 31232 - protein, 10 aa, Artificial Sequence
  Description of Artificial Sequence: Synthetic epitope
NSQSSIDQKL

SEQ ID NO: 31233 - protein, 10 aa, Artificial Sequence
  Description of Artificial Sequence: Synthetic epitope
NSQSSIDQKL

SEQ ID NO: 31234 - protein, 10 aa, Artificial Sequence
  Description of Artificial Sequence: Synthetic epitope
NSQSSIDQKL

SEQ ID NO: 31235 - protein, 10 aa, Artificial Sequence
  Description of Artificial Sequence: Synthetic epitope
NSQSSIDQKL

SEQ ID NO: 31236 - protein, 10 aa, Artificial Sequence
  Description of Artificial Sequence: Synthetic epitope
NSQSSIDQKL

SEQ ID NO: 31237 - protein, 10 aa, Artificial Sequence
  Description of Artificial Sequence: Synthetic epitope
NSQVPVQSSM

SEQ ID NO: 31238 - protein, 10 aa, Artificial Sequence
  Description of Artificial Sequence: Synthetic epitope
NSRDKVSTTV

SEQ ID NO: 31239 - protein, 10 aa, Artificial Sequence
  Description of Artificial Sequence: Synthetic epitope
NSREKKADRD

SEQ ID NO: 31240 - protein, 10 aa, Artificial Sequence
  Description of Artificial Sequence: Synthetic epitope
NSRIITVSME

SEQ ID NO: 31241 - protein, 10 aa, Artificial Sequence
  Description of Artificial Sequence: Synthetic epitope
NSRIQRQDEE

SEQ ID NO: 31242 - protein, 10 aa, Artificial Sequence
  Description of Artificial Sequence: Synthetic epitope
NSRKKSKEAA

SEQ ID NO: 31243 - protein, 10 aa, Artificial Sequence
  Description of Artificial Sequence: Synthetic epitope
NSRKLAKILE

SEQ ID NO: 31244 - protein, 10 aa, Artificial Sequence
  Description of Artificial Sequence: Synthetic epitope
NSRKSSADTE

SEQ ID NO: 31245 - protein, 10 aa, Artificial Sequence
  Description of Artificial Sequence: Synthetic epitope
NSRLASSLGN

SEQ ID NO: 31246 - protein, 10 aa, Artificial Sequence
  Description of Artificial Sequence: Synthetic epitope
NSRLKATPST

SEQ ID NO: 31247 - protein, 10 aa, Artificial Sequence
  Description of Artificial Sequence: Synthetic epitope
NSRLVVKRGE

SEQ ID NO: 31248 - protein, 10 aa, Artificial Sequence
  Description of Artificial Sequence: Synthetic epitope
NSRPARQVRR

SEQ ID NO: 31249 - protein, 10 aa, Artificial Sequence
  Description of Artificial Sequence: Synthetic epitope
NSRSLVEKRE

SEQ ID NO: 31250 - protein, 10 aa, Artificial Sequence
  Description of Artificial Sequence: Synthetic epitope
NSRSQTSIDA

SEQ ID NO: 31251 - protein, 10 aa, Artificial Sequence
  Description of Artificial Sequence: Synthetic epitope
NSRSSQIDQA

SEQ ID NO: 31252 - protein, 10 aa, Artificial Sequence
  Description of Artificial Sequence: Synthetic epitope
NSRSTQRLML

SEQ ID NO: 31253 - protein, 10 aa, Artificial Sequence
  Description of Artificial Sequence: Synthetic epitope
NSSAARTDEA

SEQ ID NO: 31254 - protein, 10 aa, Artificial Sequence
  Description of Artificial Sequence: Synthetic epitope
NSSARGRAFL

SEQ ID NO: 31255 - protein, 10 aa, Artificial Sequence
  Description of Artificial Sequence: Synthetic epitope
NSSARLFERS

SEQ ID NO: 31256 - protein, 10 aa, Artificial Sequence
  Description of Artificial Sequence: Synthetic epitope
NSSARLFERS

SEQ ID NO: 31257 - protein, 10 aa, Artificial Sequence
  Description of Artificial Sequence: Synthetic epitope
NSSASELVPP

SEQ ID NO: 31258 - protein, 10 aa, Artificial Sequence
  Description of Artificial Sequence: Synthetic epitope
NSSASFTKEQ

SEQ ID NO: 31259 - protein, 10 aa, Artificial Sequence
  Description of Artificial Sequence: Synthetic epitope
NSSASILESK

SEQ ID NO: 31260 - protein, 10 aa, Artificial Sequence
  Description of Artificial Sequence: Synthetic epitope
NSSASLNREG

SEQ ID NO: 31261 - protein, 10 aa, Artificial Sequence
  Description of Artificial Sequence: Synthetic epitope
NSSASNASGA

SEQ ID NO: 31262 - protein, 10 aa, Artificial Sequence
  Description of Artificial Sequence: Synthetic epitope
NSSASQSTDL

SEQ ID NO: 31263 - protein, 10 aa, Artificial Sequence
  Description of Artificial Sequence: Synthetic epitope
NSSAVEQDHA

SEQ ID NO: 31264 - protein, 10 aa, Artificial Sequence
  Description of Artificial Sequence: Synthetic epitope
NSSDKGKNTD

SEQ ID NO: 31265 - protein, 10 aa, Artificial Sequence
  Description of Artificial Sequence: Synthetic epitope
NSSDKVRGIE

SEQ ID NO: 31266 - protein, 10 aa, Artificial Sequence
  Description of Artificial Sequence: Synthetic epitope
NSSELSVKQR

SEQ ID NO: 31267 - protein, 10 aa, Artificial Sequence
  Description of Artificial Sequence: Synthetic epitope
NSSESVGSDA

SEQ ID NO: 31268 - protein, 10 aa, Artificial Sequence
  Description of Artificial Sequence: Synthetic epitope
NSSETKPVSS

SEQ ID NO: 31269 - protein, 10 aa, Artificial Sequence
  Description of Artificial Sequence: Synthetic epitope
NSSGGAVATE

SEQ ID NO: 31270 - protein, 10 aa, Artificial Sequence
  Description of Artificial Sequence: Synthetic epitope
NSSHASQSAG

SEQ ID NO: 31271 - protein, 10 aa, Artificial Sequence
  Description of Artificial Sequence: Synthetic epitope
NSSHDKKQAQ

SEQ ID NO: 31272 - protein, 10 aa, Artificial Sequence
  Description of Artificial Sequence: Synthetic epitope
NSSIEEASGV

SEQ ID NO: 31273 - protein, 10 aa, Artificial Sequence
  Description of Artificial Sequence: Synthetic epitope
NSSIVVSPKM

SEQ ID NO: 31274 - protein, 10 aa, Artificial Sequence
  Description of Artificial Sequence: Synthetic epitope
NSSKQLLKSD

SEQ ID NO: 31275 - protein, 10 aa, Artificial Sequence
  Description of Artificial Sequence: Synthetic epitope
NSSKTSVSAT

SEQ ID NO: 31276 - protein, 10 aa, Artificial Sequence
  Description of Artificial Sequence: Synthetic epitope
NSSLGMEKSF

SEQ ID NO: 31277 - protein, 10 aa, Artificial Sequence
  Description of Artificial Sequence: Synthetic epitope
NSSLIKVALD

SEQ ID NO: 31278 - protein, 10 aa, Artificial Sequence
  Description of Artificial Sequence: Synthetic epitope
NSSLKLNDHK

SEQ ID NO: 31279 - protein, 10 aa, Artificial Sequence
  Description of Artificial Sequence: Synthetic epitope
NSSLQTNKEP

SEQ ID NO: 31280 - protein, 10 aa, Artificial Sequence
  Description of Artificial Sequence: Synthetic epitope
NSSLSLDSAG

SEQ ID NO: 31281 - protein, 10 aa, Artificial Sequence
  Description of Artificial Sequence: Synthetic epitope
NSSNADPKSS

SEQ ID NO: 31282 - protein, 10 aa, Artificial Sequence
  Description of Artificial Sequence: Synthetic epitope
NSSNALNVKA

SEQ ID NO: 31283 - protein, 10 aa, Artificial Sequence
  Description of Artificial Sequence: Synthetic epitope
NSSQVSNEQD

SEQ ID NO: 31284 - protein, 10 aa, Artificial Sequence
  Description of Artificial Sequence: Synthetic epitope
NSSREDSLQD

SEQ ID NO: 31285 - protein, 10 aa, Artificial Sequence
  Description of Artificial Sequence: Synthetic epitope
NSSTISLTSK

SEQ ID NO: 31286 - protein, 10 aa, Artificial Sequence
  Description of Artificial Sequence: Synthetic epitope
NSSTLALLTH

SEQ ID NO: 31287 - protein, 10 aa, Artificial Sequence
  Description of Artificial Sequence: Synthetic epitope
NSSTRGTQNQ

SEQ ID NO: 31288 - protein, 10 aa, Artificial Sequence
  Description of Artificial Sequence: Synthetic epitope
NSSTVLEDSK

SEQ ID NO: 31289 - protein, 10 aa, Artificial Sequence
  Description of Artificial Sequence: Synthetic epitope
NSSVAKSAQE

SEQ ID NO: 31290 - protein, 10 aa, Artificial Sequence
  Description of Artificial Sequence: Synthetic epitope
NSSVEASSNL

SEQ ID NO: 31291 - protein, 10 aa, Artificial Sequence
  Description of Artificial Sequence: Synthetic epitope
NSSVIVRVRL

SEQ ID NO: 31292 - protein, 10 aa, Artificial Sequence
  Description of Artificial Sequence: Synthetic epitope
NSSVKFASGN

SEQ ID NO: 31293 - protein, 10 aa, Artificial Sequence
  Description of Artificial Sequence: Synthetic epitope
NSSVLASQSV

SEQ ID NO: 31294 - protein, 10 aa, Artificial Sequence
  Description of Artificial Sequence: Synthetic epitope
NSSYATLSEY

SEQ ID NO: 31295 - protein, 10 aa, Artificial Sequence
  Description of Artificial Sequence: Synthetic epitope
NSTAADEVTA

SEQ ID NO: 31296 - protein, 10 aa, Artificial Sequence
  Description of Artificial Sequence: Synthetic epitope
NSTAAKPAAS

SEQ ID NO: 31297 - protein, 10 aa, Artificial Sequence
  Description of Artificial Sequence: Synthetic epitope
NSTEAKSYRD

SEQ ID NO: 31298 - protein, 10 aa, Artificial Sequence
  Description of Artificial Sequence: Synthetic epitope
NSTELSLLAD

SEQ ID NO: 31299 - protein, 10 aa, Artificial Sequence
  Description of Artificial Sequence: Synthetic epitope
NSTHSSTAAD

SEQ ID NO: 31300 - protein, 10 aa, Artificial Sequence
  Description of Artificial Sequence: Synthetic epitope
NSTKQNSVLL

SEQ ID NO: 31301 - protein, 10 aa, Artificial Sequence
  Description of Artificial Sequence: Synthetic epitope
NSTKTSLLQK

SEQ ID NO: 31302 - protein, 10 aa, Artificial Sequence
  Description of Artificial Sequence: Synthetic epitope
NSTQMNMIRD

SEQ ID NO: 31303 - protein, 10 aa, Artificial Sequence
  Description of Artificial Sequence: Synthetic epitope
NSTQRVAVED

SEQ ID NO: 31304 - protein, 10 aa, Artificial Sequence
  Description of Artificial Sequence: Synthetic epitope
NSTRITILTE

SEQ ID NO: 31305 - protein, 10 aa, Artificial Sequence
  Description of Artificial Sequence: Synthetic epitope
NSTRMALFAG

SEQ ID NO: 31306 - protein, 10 aa, Artificial Sequence
  Description of Artificial Sequence: Synthetic epitope
NSTSNTKVSA

SEQ ID NO: 31307 - protein, 10 aa, Artificial Sequence
  Description of Artificial Sequence: Synthetic epitope
NSTSSKLLER

SEQ ID NO: 31308 - protein, 10 aa, Artificial Sequence
  Description of Artificial Sequence: Synthetic epitope
NSTTNSATKI

SEQ ID NO: 31309 - protein, 10 aa, Artificial Sequence
  Description of Artificial Sequence: Synthetic epitope
NSTTQISPIP

SEQ ID NO: 31310 - protein, 10 aa, Artificial Sequence
  Description of Artificial Sequence: Synthetic epitope
NSTVAAPSAR

SEQ ID NO: 31311 - protein, 10 aa, Artificial Sequence
  Description of Artificial Sequence: Synthetic epitope
NSTVEGSGEA

SEQ ID NO: 31312 - protein, 10 aa, Artificial Sequence
  Description of Artificial Sequence: Synthetic epitope
NSTVGLSNTD

SEQ ID NO: 31313 - protein, 10 aa, Artificial Sequence
  Description of Artificial Sequence: Synthetic epitope
NSTVSSRKQV

SEQ ID NO: 31314 - protein, 10 aa, Artificial Sequence
  Description of Artificial Sequence: Synthetic epitope
NSVAENIVQD

SEQ ID NO: 31315 - protein, 10 aa, Artificial Sequence
  Description of Artificial Sequence: Synthetic epitope
NSVEGNSVSI

SEQ ID NO: 31316 - protein, 10 aa, Artificial Sequence
  Description of Artificial Sequence: Synthetic epitope
NSVGQKVSEL

SEQ ID NO: 31317 - protein, 10 aa, Artificial Sequence
  Description of Artificial Sequence: Synthetic epitope
NSVINSLASA

SEQ ID NO: 31318 - protein, 10 aa, Artificial Sequence
  Description of Artificial Sequence: Synthetic epitope
NSVIRSLKRP

SEQ ID NO: 31319 - protein, 10 aa, Artificial Sequence
  Description of Artificial Sequence: Synthetic epitope
NSVITSMKTG

SEQ ID NO: 31320 - protein, 10 aa, Artificial Sequence
  Description of Artificial Sequence: Synthetic epitope
NSVKIVKVKK

SEQ ID NO: 31321 - protein, 10 aa, Artificial Sequence
  Description of Artificial Sequence: Synthetic epitope
NSVKKQLHLK

SEQ ID NO: 31322 - protein, 10 aa, Artificial Sequence
  Description of Artificial Sequence: Synthetic epitope
NSVKPIQIIN

SEQ ID NO: 31323 - protein, 10 aa, Artificial Sequence
  Description of Artificial Sequence: Synthetic epitope
NSVKVDELSL

SEQ ID NO: 31324 - protein, 10 aa, Artificial Sequence
  Description of Artificial Sequence: Synthetic epitope
NSVLFERTVI

SEQ ID NO: 31325 - protein, 10 aa, Artificial Sequence
  Description of Artificial Sequence: Synthetic epitope
NSVLFSITLK

SEQ ID NO: 31326 - protein, 10 aa, Artificial Sequence
  Description of Artificial Sequence: Synthetic epitope
NSVLVIIDVK

SEQ ID NO: 31327 - protein, 10 aa, Artificial Sequence
  Description of Artificial Sequence: Synthetic epitope
NSVNSVSLGK

SEQ ID NO: 31328 - protein, 10 aa, Artificial Sequence
  Description of Artificial Sequence: Synthetic epitope
NSVPKAESPA

SEQ ID NO: 31329 - protein, 10 aa, Artificial Sequence
  Description of Artificial Sequence: Synthetic epitope
NSVPSGSSAQ

SEQ ID NO: 31330 - protein, 10 aa, Artificial Sequence
  Description of Artificial Sequence: Synthetic epitope
NSVPVTVAMV

SEQ ID NO: 31331 - protein, 10 aa, Artificial Sequence
  Description of Artificial Sequence: Synthetic epitope
NSVSIIKGAE

SEQ ID NO: 31332 - protein, 10 aa, Artificial Sequence
  Description of Artificial Sequence: Synthetic epitope
NSVTYKKVEN

SEQ ID NO: 31333 - protein, 10 aa, Artificial Sequence
  Description of Artificial Sequence: Synthetic epitope
NSVVEIESSQ

SEQ ID NO: 31334 - protein, 10 aa, Artificial Sequence
  Description of Artificial Sequence: Synthetic epitope
NSVVKITSKK

SEQ ID NO: 31335 - protein, 10 aa, Artificial Sequence
  Description of Artificial Sequence: Synthetic epitope
NSVYAPKSLK

SEQ ID NO: 31336 - protein, 10 aa, Artificial Sequence
  Description of Artificial Sequence: Synthetic epitope
NSWEVNLQSI

SEQ ID NO: 31337 - protein, 10 aa, Artificial Sequence
  Description of Artificial Sequence: Synthetic epitope
NSWRSKTLKD

SEQ ID NO: 31338 - protein, 10 aa, Artificial Sequence
  Description of Artificial Sequence: Synthetic epitope
NSYLSQESEN

SEQ ID NO: 31339 - protein, 10 aa, Artificial Sequence
  Description of Artificial Sequence: Synthetic epitope
NSYPSETTVK

SEQ ID NO: 31340 - protein, 10 aa, Artificial Sequence
  Description of Artificial Sequence: Synthetic epitope
NTAAGEDADV

SEQ ID NO: 31341 - protein, 10 aa, Artificial Sequence
  Description of Artificial Sequence: Synthetic epitope
NTAHSARKQP

SEQ ID NO: 31342 - protein, 10 aa, Artificial Sequence
  Description of Artificial Sequence: Synthetic epitope
NTAIAVSQMS

SEQ ID NO: 31343 - protein, 10 aa, Artificial Sequence
  Description of Artificial Sequence: Synthetic epitope
NTAISEVIGK

SEQ ID NO: 31344 - protein, 10 aa, Artificial Sequence
  Description of Artificial Sequence: Synthetic epitope
NTAKADVPYI

SEQ ID NO: 31345 - protein, 10 aa, Artificial Sequence
  Description of Artificial Sequence: Synthetic epitope
NTAKITIKDV

SEQ ID NO: 31346 - protein, 10 aa, Artificial Sequence
  Description of Artificial Sequence: Synthetic epitope
NTAQEQQYGS

SEQ ID NO: 31347 - protein, 10 aa, Artificial Sequence
  Description of Artificial Sequence: Synthetic epitope
NTARSMVSTI

SEQ ID NO: 31348 - protein, 10 aa, Artificial Sequence
  Description of Artificial Sequence: Synthetic epitope
NTASAVLETI

SEQ ID NO: 31349 - protein, 10 aa, Artificial Sequence
  Description of Artificial Sequence: Synthetic epitope
NTASKIYMQM

SEQ ID NO: 31350 - protein, 10 aa, Artificial Sequence
  Description of Artificial Sequence: Synthetic epitope
NTASQEDKDD

SEQ ID NO: 31351 - protein, 10 aa, Artificial Sequence
  Description of Artificial Sequence: Synthetic epitope
NTASTKELEA

SEQ ID NO: 31352 - protein, 10 aa, Artificial Sequence
  Description of Artificial Sequence: Synthetic epitope
NTAVKLIAPE

SEQ ID NO: 31353 - protein, 10 aa, Artificial Sequence
  Description of Artificial Sequence: Synthetic epitope
NTDKKLESLV

SEQ ID NO: 31354 - protein, 10 aa, Artificial Sequence
  Description of Artificial Sequence: Synthetic epitope
NTDLLESKIA

SEQ ID NO: 31355 - protein, 10 aa, Artificial Sequence
  Description of Artificial Sequence: Synthetic epitope
NTDLLSMTSS

SEQ ID NO: 31356 - protein, 10 aa, Artificial Sequence
  Description of Artificial Sequence: Synthetic epitope
NTDLSEDSER

SEQ ID NO: 31357 - protein, 10 aa, Artificial Sequence
  Description of Artificial Sequence: Synthetic epitope
NTDQEESTIS

SEQ ID NO: 31358 - protein, 10 aa, Artificial Sequence
  Description of Artificial Sequence: Synthetic epitope
NTDQENRLES

SEQ ID NO: 31359 - protein, 10 aa, Artificial Sequence
  Description of Artificial Sequence: Synthetic epitope
NTDQVNSSTS

SEQ ID NO: 31360 - protein, 10 aa, Artificial Sequence
  Description of Artificial Sequence: Synthetic epitope
NTDSMTLNNT

SEQ ID NO: 31361 - protein, 10 aa, Artificial Sequence
  Description of Artificial Sequence: Synthetic epitope
NTDSQKLNKI

SEQ ID NO: 31362 - protein, 10 aa, Artificial Sequence
  Description of Artificial Sequence: Synthetic epitope
NTDSSLLNSE

SEQ ID NO: 31363 - protein, 10 aa, Artificial Sequence
  Description of Artificial Sequence: Synthetic epitope
NTDVAQSPEA

SEQ ID NO: 31364 - protein, 10 aa, Artificial Sequence
  Description of Artificial Sequence: Synthetic epitope
NTEANTAEEQ

SEQ ID NO: 31365 - protein, 10 aa, Artificial Sequence
  Description of Artificial Sequence: Synthetic epitope
NTEARTMAAE

SEQ ID NO: 31366 - protein, 10 aa, Artificial Sequence
  Description of Artificial Sequence: Synthetic epitope
NTEIIVKLSD

SEQ ID NO: 31367 - protein, 10 aa, Artificial Sequence
  Description of Artificial Sequence: Synthetic epitope
NTEKTEQQPQ

SEQ ID NO: 31368 - protein, 10 aa, Artificial Sequence
  Description of Artificial Sequence: Synthetic epitope
NTELPYQSTM

SEQ ID NO: 31369 - protein, 10 aa, Artificial Sequence
  Description of Artificial Sequence: Synthetic epitope
NTENVNMLMN

SEQ ID NO: 31370 - protein, 10 aa, Artificial Sequence
  Description of Artificial Sequence: Synthetic epitope
NTETATEVDI

SEQ ID NO: 31371 - protein, 10 aa, Artificial Sequence
  Description of Artificial Sequence: Synthetic epitope
NTETLVSKGK

SEQ ID NO: 31372 - protein, 10 aa, Artificial Sequence
  Description of Artificial Sequence: Synthetic epitope
NTEVSNPMEY

SEQ ID NO: 31373 - protein, 10 aa, Artificial Sequence
  Description of Artificial Sequence: Synthetic epitope
NTFGKAGIKT

SEQ ID NO: 31374 - protein, 10 aa, Artificial Sequence
  Description of Artificial Sequence: Synthetic epitope
NTFHKSAIKR

SEQ ID NO: 31375 - protein, 10 aa, Artificial Sequence
  Description of Artificial Sequence: Synthetic epitope
NTFHKSAIKR

SEQ ID NO: 31376 - protein, 10 aa, Artificial Sequence
  Description of Artificial Sequence: Synthetic epitope
NTFIIQAEAN

SEQ ID NO: 31377 - protein, 10 aa, Artificial Sequence
  Description of Artificial Sequence: Synthetic epitope
NTFQQEMKES

SEQ ID NO: 31378 - protein, 10 aa, Artificial Sequence
  Description of Artificial Sequence: Synthetic epitope
NTGEDKSSKN

SEQ ID NO: 31379 - protein, 10 aa, Artificial Sequence
  Description of Artificial Sequence: Synthetic epitope
NTGRQESTSS

SEQ ID NO: 31380 - protein, 10 aa, Artificial Sequence
  Description of Artificial Sequence: Synthetic epitope
NTGSESNSAT

SEQ ID NO: 31381 - protein, 10 aa, Artificial Sequence
  Description of Artificial Sequence: Synthetic epitope
NTGSQFVMEG

SEQ ID NO: 31382 - protein, 10 aa, Artificial Sequence
  Description of Artificial Sequence: Synthetic epitope
NTGTNVDTKK

SEQ ID NO: 31383 - protein, 10 aa, Artificial Sequence
  Description of Artificial Sequence: Synthetic epitope
NTHEKRIYQS

SEQ ID NO: 31384 - protein, 10 aa, Artificial Sequence
  Description of Artificial Sequence: Synthetic epitope
NTHNRNEPEY

SEQ ID NO: 31385 - protein, 10 aa, Artificial Sequence
  Description of Artificial Sequence: Synthetic epitope
NTHRTAVEQW

SEQ ID NO: 31386 - protein, 10 aa, Artificial Sequence
  Description of Artificial Sequence: Synthetic epitope
NTHTKVLANN

SEQ ID NO: 31387 - protein, 10 aa, Artificial Sequence
  Description of Artificial Sequence: Synthetic epitope
NTHVAEAEFD

SEQ ID NO: 31388 - protein, 10 aa, Artificial Sequence
  Description of Artificial Sequence: Synthetic epitope
NTIKMRITRT

SEQ ID NO: 31389 - protein, 10 aa, Artificial Sequence
  Description of Artificial Sequence: Synthetic epitope
NTIKMVTLQL

SEQ ID NO: 31390 - protein, 10 aa, Artificial Sequence
  Description of Artificial Sequence: Synthetic epitope
NTILASTSSE

SEQ ID NO: 31391 - protein, 10 aa, Artificial Sequence
  Description of Artificial Sequence: Synthetic epitope
NTIPDSIDTS

SEQ ID NO: 31392 - protein, 10 aa, Artificial Sequence
  Description of Artificial Sequence: Synthetic epitope
NTIQGASLSS

SEQ ID NO: 31393 - protein, 10 aa, Artificial Sequence
  Description of Artificial Sequence: Synthetic epitope
NTIRSALQDE

SEQ ID NO: 31394 - protein, 10 aa, Artificial Sequence
  Description of Artificial Sequence: Synthetic epitope
NTISTVDLNK

SEQ ID NO: 31395 - protein, 10 aa, Artificial Sequence
  Description of Artificial Sequence: Synthetic epitope
NTIVIESVVE

SEQ ID NO: 31396 - protein, 10 aa, Artificial Sequence
  Description of Artificial Sequence: Synthetic epitope
NTIVKPYQRK

SEQ ID NO: 31397 - protein, 10 aa, Artificial Sequence
  Description of Artificial Sequence: Synthetic epitope
NTKADDSHTV

SEQ ID NO: 31398 - protein, 10 aa, Artificial Sequence
  Description of Artificial Sequence: Synthetic epitope
NTKAIRTTAH

SEQ ID NO: 31399 - protein, 10 aa, Artificial Sequence
  Description of Artificial Sequence: Synthetic epitope
NTKDKMSRKV

SEQ ID NO: 31400 - protein, 10 aa, Artificial Sequence
  Description of Artificial Sequence: Synthetic epitope
NTKDRAEMTW

SEQ ID NO: 31401 - protein, 10 aa, Artificial Sequence
  Description of Artificial Sequence: Synthetic epitope
NTKDSVKFFD

SEQ ID NO: 31402 - protein, 10 aa, Artificial Sequence
  Description of Artificial Sequence: Synthetic epitope
NTKEAISEAT

SEQ ID NO: 31403 - protein, 10 aa, Artificial Sequence
  Description of Artificial Sequence: Synthetic epitope
NTKGKLFTPL

SEQ ID NO: 31404 - protein, 10 aa, Artificial Sequence
  Description of Artificial Sequence: Synthetic epitope
NTKHKEAVME

SEQ ID NO: 31405 - protein, 10 aa, Artificial Sequence
  Description of Artificial Sequence: Synthetic epitope
NTKIADEYMI

SEQ ID NO: 31406 - protein, 10 aa, Artificial Sequence
  Description of Artificial Sequence: Synthetic epitope
NTKLIRTGVS

SEQ ID NO: 31407 - protein, 10 aa, Artificial Sequence
  Description of Artificial Sequence: Synthetic epitope
NTKLQKAQSF

SEQ ID NO: 31408 - protein, 10 aa, Artificial Sequence
  Description of Artificial Sequence: Synthetic epitope
NTKQEEKSAL

SEQ ID NO: 31409 - protein, 10 aa, Artificial Sequence
  Description of Artificial Sequence: Synthetic epitope
NTKRTIKVPH

SEQ ID NO: 31410 - protein, 10 aa, Artificial Sequence
  Description of Artificial Sequence: Synthetic epitope
NTKSDLHQNT

SEQ ID NO: 31411 - protein, 10 aa, Artificial Sequence
  Description of Artificial Sequence: Synthetic epitope
NTKSKASTVG

SEQ ID NO: 31412 - protein, 10 aa, Artificial Sequence
  Description of Artificial Sequence: Synthetic epitope
NTKSVDTKAS

SEQ ID NO: 31413 - protein, 10 aa, Artificial Sequence
  Description of Artificial Sequence: Synthetic epitope
NTKTDVITSA

SEQ ID NO: 31414 - protein, 10 aa, Artificial Sequence
  Description of Artificial Sequence: Synthetic epitope
NTKTEILKKE

SEQ ID NO: 31415 - protein, 10 aa, Artificial Sequence
  Description of Artificial Sequence: Synthetic epitope
NTKTGAAGAE

SEQ ID NO: 31416 - protein, 10 aa, Artificial Sequence
  Description of Artificial Sequence: Synthetic epitope
NTKVQQKKEE

SEQ ID NO: 31417 - protein, 10 aa, Artificial Sequence
  Description of Artificial Sequence: Synthetic epitope
NTLAVNAAQD

SEQ ID NO: 31418 - protein, 10 aa, Artificial Sequence
  Description of Artificial Sequence: Synthetic epitope
NTLDSEVPAA

SEQ ID NO: 31419 - protein, 10 aa, Artificial Sequence
  Description of Artificial Sequence: Synthetic epitope
NTLEENSTNE

SEQ ID NO: 31420 - protein, 10 aa, Artificial Sequence
  Description of Artificial Sequence: Synthetic epitope
NTLESTQASL

SEQ ID NO: 31421 - protein, 10 aa, Artificial Sequence
  Description of Artificial Sequence: Synthetic epitope
NTLGISTTKK

SEQ ID NO: 31422 - protein, 10 aa, Artificial Sequence
  Description of Artificial Sequence: Synthetic epitope
NTLISQKKLR

SEQ ID NO: 31423 - protein, 10 aa, Artificial Sequence
  Description of Artificial Sequence: Synthetic epitope
NTLMSMTNAT

SEQ ID NO: 31424 - protein, 10 aa, Artificial Sequence
  Description of Artificial Sequence: Synthetic epitope
NTLNAQIQVL

SEQ ID NO: 31425 - protein, 10 aa, Artificial Sequence
  Description of Artificial Sequence: Synthetic epitope
NTLQQASQAQ

SEQ ID NO: 31426 - protein, 10 aa, Artificial Sequence
  Description of Artificial Sequence: Synthetic epitope
NTLRLTKAHS

SEQ ID NO: 31427 - protein, 10 aa, Artificial Sequence
  Description of Artificial Sequence: Synthetic epitope
NTLSKLLSTK

SEQ ID NO: 31428 - protein, 10 aa, Artificial Sequence
  Description of Artificial Sequence: Synthetic epitope
NTLSSKVKEL

SEQ ID NO: 31429 - protein, 10 aa, Artificial Sequence
  Description of Artificial Sequence: Synthetic epitope
NTLTEAEKLL

SEQ ID NO: 31430 - protein, 10 aa, Artificial Sequence
  Description of Artificial Sequence: Synthetic epitope
NTMSLLAANN

SEQ ID NO: 31431 - protein, 10 aa, Artificial Sequence
  Description of Artificial Sequence: Synthetic epitope
NTMWVKRKYI

SEQ ID NO: 31432 - protein, 10 aa, Artificial Sequence
  Description of Artificial Sequence: Synthetic epitope
NTNAETLSTN

SEQ ID NO: 31433 - protein, 10 aa, Artificial Sequence
  Description of Artificial Sequence: Synthetic epitope
NTNIPIGNKK

SEQ ID NO: 31434 - protein, 10 aa, Artificial Sequence
  Description of Artificial Sequence: Synthetic epitope
NTNLFQLGHK

SEQ ID NO: 31435 - protein, 10 aa, Artificial Sequence
  Description of Artificial Sequence: Synthetic epitope
NTNLFQLGHK

SEQ ID NO: 31436 - protein, 10 aa, Artificial Sequence
  Description of Artificial Sequence: Synthetic epitope
NTNMQSVQLN

SEQ ID NO: 31437 - protein, 10 aa, Artificial Sequence
  Description of Artificial Sequence: Synthetic epitope
NTNQSADSIT

SEQ ID NO: 31438 - protein, 10 aa, Artificial Sequence
  Description of Artificial Sequence: Synthetic epitope
NTNQTVTTKY

SEQ ID NO: 31439 - protein, 10 aa, Artificial Sequence
  Description of Artificial Sequence: Synthetic epitope
NTNSNSSLIT

SEQ ID NO: 31440 - protein, 10 aa, Artificial Sequence
  Description of Artificial Sequence: Synthetic epitope
NTNTVHKSVA

SEQ ID NO: 31441 - protein, 10 aa, Artificial Sequence
  Description of Artificial Sequence: Synthetic epitope
NTPEKSVVSL

SEQ ID NO: 31442 - protein, 10 aa, Artificial Sequence
  Description of Artificial Sequence: Synthetic epitope
NTPEMEQRET

SEQ ID NO: 31443 - protein, 10 aa, Artificial Sequence
  Description of Artificial Sequence: Synthetic epitope
NTPESIAETP

SEQ ID NO: 31444 - protein, 10 aa, Artificial Sequence
  Description of Artificial Sequence: Synthetic epitope
NTPFELIATE

SEQ ID NO: 31445 - protein, 10 aa, Artificial Sequence
  Description of Artificial Sequence: Synthetic epitope
NTPMQINGNF

SEQ ID NO: 31446 - protein, 10 aa, Artificial Sequence
  Description of Artificial Sequence: Synthetic epitope
NTPTATTANN

SEQ ID NO: 31447 - protein, 10 aa, Artificial Sequence
  Description of Artificial Sequence: Synthetic epitope
NTPTPWWDMH

SEQ ID NO: 31448 - protein, 10 aa, Artificial Sequence
  Description of Artificial Sequence: Synthetic epitope
NTQEVAVKEK

SEQ ID NO: 31449 - protein, 10 aa, Artificial Sequence
  Description of Artificial Sequence: Synthetic epitope
NTQKGTEMSM

SEQ ID NO: 31450 - protein, 10 aa, Artificial Sequence
  Description of Artificial Sequence: Synthetic epitope
NTQSNEETAG

SEQ ID NO: 31451 - protein, 10 aa, Artificial Sequence
  Description of Artificial Sequence: Synthetic epitope
NTQSNQLSEE

SEQ ID NO: 31452 - protein, 10 aa, Artificial Sequence
  Description of Artificial Sequence: Synthetic epitope
NTQVTALIKL

SEQ ID NO: 31453 - protein, 10 aa, Artificial Sequence
  Description of Artificial Sequence: Synthetic epitope
NTRKMTSLLE

SEQ ID NO: 31454 - protein, 10 aa, Artificial Sequence
  Description of Artificial Sequence: Synthetic epitope
NTRLEKTAKE

SEQ ID NO: 31455 - protein, 10 aa, Artificial Sequence
  Description of Artificial Sequence: Synthetic epitope
NTRLISGVVQ

SEQ ID NO: 31456 - protein, 10 aa, Artificial Sequence
  Description of Artificial Sequence: Synthetic epitope
NTRLSQTMLG

SEQ ID NO: 31457 - protein, 10 aa, Artificial Sequence
  Description of Artificial Sequence: Synthetic epitope
NTRQDEAEAS

SEQ ID NO: 31458 - protein, 10 aa, Artificial Sequence
  Description of Artificial Sequence: Synthetic epitope
NTRSTSQTFI

SEQ ID NO: 31459 - protein, 10 aa, Artificial Sequence
  Description of Artificial Sequence: Synthetic epitope
NTRTPSSVRK

SEQ ID NO: 31460 - protein, 10 aa, Artificial Sequence
  Description of Artificial Sequence: Synthetic epitope
NTRVKAKQKP

SEQ ID NO: 31461 - protein, 10 aa, Artificial Sequence
  Description of Artificial Sequence: Synthetic epitope
NTSASLSRVN

SEQ ID NO: 31462 - protein, 10 aa, Artificial Sequence
  Description of Artificial Sequence: Synthetic epitope
NTSEKITSLF

SEQ ID NO: 31463 - protein, 10 aa, Artificial Sequence
  Description of Artificial Sequence: Synthetic epitope
NTSEQDQAGT

SEQ ID NO: 31464 - protein, 10 aa, Artificial Sequence
  Description of Artificial Sequence: Synthetic epitope
NTSIASPADS

SEQ ID NO: 31465 - protein, 10 aa, Artificial Sequence
  Description of Artificial Sequence: Synthetic epitope
NTSKAANFRN

SEQ ID NO: 31466 - protein, 10 aa, Artificial Sequence
  Description of Artificial Sequence: Synthetic epitope
NTSKLNVFQI

SEQ ID NO: 31467 - protein, 10 aa, Artificial Sequence
  Description of Artificial Sequence: Synthetic epitope
NTSKMTASSQ

SEQ ID NO: 31468 - protein, 10 aa, Artificial Sequence
  Description of Artificial Sequence: Synthetic epitope
NTSLDQNSSK

SEQ ID NO: 31469 - protein, 10 aa, Artificial Sequence
  Description of Artificial Sequence: Synthetic epitope
NTSPSQSVQF

SEQ ID NO: 31470 - protein, 10 aa, Artificial Sequence
  Description of Artificial Sequence: Synthetic epitope
NTSPTTQPTA

SEQ ID NO: 31471 - protein, 10 aa, Artificial Sequence
  Description of Artificial Sequence: Synthetic epitope
NTSQATLGPE

SEQ ID NO: 31472 - protein, 10 aa, Artificial Sequence
  Description of Artificial Sequence: Synthetic epitope
NTSSNSSPLN

SEQ ID NO: 31473 - protein, 10 aa, Artificial Sequence
  Description of Artificial Sequence: Synthetic epitope
NTSSNTGDTQ

SEQ ID NO: 31474 - protein, 10 aa, Artificial Sequence
  Description of Artificial Sequence: Synthetic epitope
NTSTGQIDSE

SEQ ID NO: 31475 - protein, 10 aa, Artificial Sequence
  Description of Artificial Sequence: Synthetic epitope
NTSTQRLLNA

SEQ ID NO: 31476 - protein, 10 aa, Artificial Sequence
  Description of Artificial Sequence: Synthetic epitope
NTSTQSLTAE

SEQ ID NO: 31477 - protein, 10 aa, Artificial Sequence
  Description of Artificial Sequence: Synthetic epitope
NTSYLMENVT

SEQ ID NO: 31478 - protein, 10 aa, Artificial Sequence
  Description of Artificial Sequence: Synthetic epitope
NTSYQSQLIK

SEQ ID NO: 31479 - protein, 10 aa, Artificial Sequence
  Description of Artificial Sequence: Synthetic epitope
NTTEISATSG

SEQ ID NO: 31480 - protein, 10 aa, Artificial Sequence
  Description of Artificial Sequence: Synthetic epitope
NTTEKRAAER

SEQ ID NO: 31481 - protein, 10 aa, Artificial Sequence
  Description of Artificial Sequence: Synthetic epitope
NTTIAHVTLD

SEQ ID NO: 31482 - protein, 10 aa, Artificial Sequence
  Description of Artificial Sequence: Synthetic epitope
NTTISVNVDT

SEQ ID NO: 31483 - protein, 10 aa, Artificial Sequence
  Description of Artificial Sequence: Synthetic epitope
NTTLVHQTTP

SEQ ID NO: 31484 - protein, 10 aa, Artificial Sequence
  Description of Artificial Sequence: Synthetic epitope
NTTLVSETEE

SEQ ID NO: 31485 - protein, 10 aa, Artificial Sequence
  Description of Artificial Sequence: Synthetic epitope
NTTNAKQILN

SEQ ID NO: 31486 - protein, 10 aa, Artificial Sequence
  Description of Artificial Sequence: Synthetic epitope
NTTRASSVEI

SEQ ID NO: 31487 - protein, 10 aa, Artificial Sequence
  Description of Artificial Sequence: Synthetic epitope
NTTRLSTPDT

SEQ ID NO: 31488 - protein, 10 aa, Artificial Sequence
  Description of Artificial Sequence: Synthetic epitope
NTTSASTPRS

SEQ ID NO: 31489 - protein, 10 aa, Artificial Sequence
  Description of Artificial Sequence: Synthetic epitope
NTTSKSMEAG

SEQ ID NO: 31490 - protein, 10 aa, Artificial Sequence
  Description of Artificial Sequence: Synthetic epitope
NTTSQMQAAL

SEQ ID NO: 31491 - protein, 10 aa, Artificial Sequence
  Description of Artificial Sequence: Synthetic epitope
NTTVAVAMGK

SEQ ID NO: 31492 - protein, 10 aa, Artificial Sequence
  Description of Artificial Sequence: Synthetic epitope
NTTVDELMMR

SEQ ID NO: 31493 - protein, 10 aa, Artificial Sequence
  Description of Artificial Sequence: Synthetic epitope
NTTVISEKNK

SEQ ID NO: 31494 - protein, 10 aa, Artificial Sequence
  Description of Artificial Sequence: Synthetic epitope
NTTVRVDNGQ

SEQ ID NO: 31495 - protein, 10 aa, Artificial Sequence
  Description of Artificial Sequence: Synthetic epitope
NTVAVQSNLA

SEQ ID NO: 31496 - protein, 10 aa, Artificial Sequence
  Description of Artificial Sequence: Synthetic epitope
NTVKDSKAEP

SEQ ID NO: 31497 - protein, 10 aa, Artificial Sequence
  Description of Artificial Sequence: Synthetic epitope
NTVQEAVGQD

SEQ ID NO: 31498 - protein, 10 aa, Artificial Sequence
  Description of Artificial Sequence: Synthetic epitope
NTVQQHKPEQ

SEQ ID NO: 31499 - protein, 10 aa, Artificial Sequence
  Description of Artificial Sequence: Synthetic epitope
NTVSITEYEE

SEQ ID NO: 31500 - protein, 10 aa, Artificial Sequence
  Description of Artificial Sequence: Synthetic epitope
NTVSKLVRDF

SEQ ID NO: 31501 - protein, 10 aa, Artificial Sequence
  Description of Artificial Sequence: Synthetic epitope
NTVSMKQKLL

SEQ ID NO: 31502 - protein, 10 aa, Artificial Sequence
  Description of Artificial Sequence: Synthetic epitope
NTVSNRLSTE

SEQ ID NO: 31503 - protein, 10 aa, Artificial Sequence
  Description of Artificial Sequence: Synthetic epitope
NTVSQSISGD

SEQ ID NO: 31504 - protein, 10 aa, Artificial Sequence
  Description of Artificial Sequence: Synthetic epitope
NTVTLATSIK

SEQ ID NO: 31505 - protein, 10 aa, Artificial Sequence
  Description of Artificial Sequence: Synthetic epitope
NTVTTSSLSG

SEQ ID NO: 31506 - protein, 10 aa, Artificial Sequence
  Description of Artificial Sequence: Synthetic epitope
NTVVSQSAPN

SEQ ID NO: 31507 - protein, 10 aa, Artificial Sequence
  Description of Artificial Sequence: Synthetic epitope
NTVVSTYVTT

SEQ ID NO: 31508 - protein, 10 aa, Artificial Sequence
  Description of Artificial Sequence: Synthetic epitope
NTWAKVAYTA

SEQ ID NO: 31509 - protein, 10 aa, Artificial Sequence
  Description of Artificial Sequence: Synthetic epitope
NTWAQSVHQA

SEQ ID NO: 31510 - protein, 10 aa, Artificial Sequence
  Description of Artificial Sequence: Synthetic epitope
NTWGNAEDTW

SEQ ID NO: 31511 - protein, 10 aa, Artificial Sequence
  Description of Artificial Sequence: Synthetic epitope
NTYQTMPYGS

SEQ ID NO: 31512 - protein, 10 aa, Artificial Sequence
  Description of Artificial Sequence: Synthetic epitope
NVAAELVQGT

SEQ ID NO: 31513 - protein, 10 aa, Artificial Sequence
  Description of Artificial Sequence: Synthetic epitope
NVAEVDTRES

SEQ ID NO: 31514 - protein, 10 aa, Artificial Sequence
  Description of Artificial Sequence: Synthetic epitope
NVAQSIGPTP

SEQ ID NO: 31515 - protein, 10 aa, Artificial Sequence
  Description of Artificial Sequence: Synthetic epitope
NVASSKSESP

SEQ ID NO: 31516 - protein, 10 aa, Artificial Sequence
  Description of Artificial Sequence: Synthetic epitope
NVATAAMQQG

SEQ ID NO: 31517 - protein, 10 aa, Artificial Sequence
  Description of Artificial Sequence: Synthetic epitope
NVATSNSSRI

SEQ ID NO: 31518 - protein, 10 aa, Artificial Sequence
  Description of Artificial Sequence: Synthetic epitope
NVATVPTTEQ

SEQ ID NO: 31519 - protein, 10 aa, Artificial Sequence
  Description of Artificial Sequence: Synthetic epitope
NVDAVISKIE

SEQ ID NO: 31520 - protein, 10 aa, Artificial Sequence
  Description of Artificial Sequence: Synthetic epitope
NVDNSVTAKV

SEQ ID NO: 31521 - protein, 10 aa, Artificial Sequence
  Description of Artificial Sequence: Synthetic epitope
NVEDRSGILT

SEQ ID NO: 31522 - protein, 10 aa, Artificial Sequence
  Description of Artificial Sequence: Synthetic epitope
NVEFSEKELS

SEQ ID NO: 31523 - protein, 10 aa, Artificial Sequence
  Description of Artificial Sequence: Synthetic epitope
NVEMIELERN

SEQ ID NO: 31524 - protein, 10 aa, Artificial Sequence
  Description of Artificial Sequence: Synthetic epitope
NVEQARFASA

SEQ ID NO: 31525 - protein, 10 aa, Artificial Sequence
  Description of Artificial Sequence: Synthetic epitope
NVEQSSDLQD

SEQ ID NO: 31526 - protein, 10 aa, Artificial Sequence
  Description of Artificial Sequence: Synthetic epitope
NVERFLSYSP

SEQ ID NO: 31527 - protein, 10 aa, Artificial Sequence
  Description of Artificial Sequence: Synthetic epitope
NVERVLKSVA

SEQ ID NO: 31528 - protein, 10 aa, Artificial Sequence
  Description of Artificial Sequence: Synthetic epitope
NVEVEVLSPA

SEQ ID NO: 31529 - protein, 10 aa, Artificial Sequence
  Description of Artificial Sequence: Synthetic epitope
NVFLSLRAAD

SEQ ID NO: 31530 - protein, 10 aa, Artificial Sequence
  Description of Artificial Sequence: Synthetic epitope
NVFTVSYFKN

SEQ ID NO: 31531 - protein, 10 aa, Artificial Sequence
  Description of Artificial Sequence: Synthetic epitope
NVGSQVKDPA

SEQ ID NO: 31532 - protein, 10 aa, Artificial Sequence
  Description of Artificial Sequence: Synthetic epitope
NVHSANVSKV

SEQ ID NO: 31533 - protein, 10 aa, Artificial Sequence
  Description of Artificial Sequence: Synthetic epitope
NVHSSRALDV

SEQ ID NO: 31534 - protein, 10 aa, Artificial Sequence
  Description of Artificial Sequence: Synthetic epitope
NVIAETIKGQ

SEQ ID NO: 31535 - protein, 10 aa, Artificial Sequence
  Description of Artificial Sequence: Synthetic epitope
NVIAMAREQE

SEQ ID NO: 31536 - protein, 10 aa, Artificial Sequence
  Description of Artificial Sequence: Synthetic epitope
NVIQTVPNLD

SEQ ID NO: 31537 - protein, 10 aa, Artificial Sequence
  Description of Artificial Sequence: Synthetic epitope
NVIRDTKTRR

SEQ ID NO: 31538 - protein, 10 aa, Artificial Sequence
  Description of Artificial Sequence: Synthetic epitope
NVIRGEKQYL

SEQ ID NO: 31539 - protein, 10 aa, Artificial Sequence
  Description of Artificial Sequence: Synthetic epitope
NVISKSQLKN

SEQ ID NO: 31540 - protein, 10 aa, Artificial Sequence
  Description of Artificial Sequence: Synthetic epitope
NVISRKRTSS

SEQ ID NO: 31541 - protein, 10 aa, Artificial Sequence
  Description of Artificial Sequence: Synthetic epitope
NVISVLFQNS

SEQ ID NO: 31542 - protein, 10 aa, Artificial Sequence
  Description of Artificial Sequence: Synthetic epitope
NVIVSIIREG

SEQ ID NO: 31543 - protein, 10 aa, Artificial Sequence
  Description of Artificial Sequence: Synthetic epitope
NVKAMSIEES

SEQ ID NO: 31544 - protein, 10 aa, Artificial Sequence
  Description of Artificial Sequence: Synthetic epitope
NVKEKKRAKG

SEQ ID NO: 31545 - protein, 10 aa, Artificial Sequence
  Description of Artificial Sequence: Synthetic epitope
NVKGHGRADE

SEQ ID NO: 31546 - protein, 10 aa, Artificial Sequence
  Description of Artificial Sequence: Synthetic epitope
NVKLKAAEEI

SEQ ID NO: 31547 - protein, 10 aa, Artificial Sequence
  Description of Artificial Sequence: Synthetic epitope
NVKQFAKFVV

SEQ ID NO: 31548 - protein, 10 aa, Artificial Sequence
  Description of Artificial Sequence: Synthetic epitope
NVKSSGSVLA

SEQ ID NO: 31549 - protein, 10 aa, Artificial Sequence
  Description of Artificial Sequence: Synthetic epitope
NVKSVAEALQ

SEQ ID NO: 31550 - protein, 10 aa, Artificial Sequence
  Description of Artificial Sequence: Synthetic epitope
NVKTETESEE

SEQ ID NO: 31551 - protein, 10 aa, Artificial Sequence
  Description of Artificial Sequence: Synthetic epitope
NVKTLKTKLE

SEQ ID NO: 31552 - protein, 10 aa, Artificial Sequence
  Description of Artificial Sequence: Synthetic epitope
NVKVKVLKQK

SEQ ID NO: 31553 - protein, 10 aa, Artificial Sequence
  Description of Artificial Sequence: Synthetic epitope
NVKYRKNIGE

SEQ ID NO: 31554 - protein, 10 aa, Artificial Sequence
  Description of Artificial Sequence: Synthetic epitope
NVLAELHQEH

SEQ ID NO: 31555 - protein, 10 aa, Artificial Sequence
  Description of Artificial Sequence: Synthetic epitope
NVLDIMVTKP

SEQ ID NO: 31556 - protein, 10 aa, Artificial Sequence
  Description of Artificial Sequence: Synthetic epitope
NVLERSDKKA

SEQ ID NO: 31557 - protein, 10 aa, Artificial Sequence
  Description of Artificial Sequence: Synthetic epitope
NVLKEYIAEK

SEQ ID NO: 31558 - protein, 10 aa, Artificial Sequence
  Description of Artificial Sequence: Synthetic epitope
NVLKFSAIAQ

SEQ ID NO: 31559 - protein, 10 aa, Artificial Sequence
  Description of Artificial Sequence: Synthetic epitope
NVLKGSSQGS

SEQ ID NO: 31560 - protein, 10 aa, Artificial Sequence
  Description of Artificial Sequence: Synthetic epitope
NVLKISATET

SEQ ID NO: 31561 - protein, 10 aa, Artificial Sequence
  Description of Artificial Sequence: Synthetic epitope
NVLKSSRSLT

SEQ ID NO: 31562 - protein, 10 aa, Artificial Sequence
  Description of Artificial Sequence: Synthetic epitope
NVLQSNSTKK

SEQ ID NO: 31563 - protein, 10 aa, Artificial Sequence
  Description of Artificial Sequence: Synthetic epitope
NVLRTDSSHQ

SEQ ID NO: 31564 - protein, 10 aa, Artificial Sequence
  Description of Artificial Sequence: Synthetic epitope
NVLTDIKLGK

SEQ ID NO: 31565 - protein, 10 aa, Artificial Sequence
  Description of Artificial Sequence: Synthetic epitope
NVMIRYPVPS

SEQ ID NO: 31566 - protein, 10 aa, Artificial Sequence
  Description of Artificial Sequence: Synthetic epitope
NVMKQLIGSS

SEQ ID NO: 31567 - protein, 10 aa, Artificial Sequence
  Description of Artificial Sequence: Synthetic epitope
NVMNKARQPP

SEQ ID NO: 31568 - protein, 10 aa, Artificial Sequence
  Description of Artificial Sequence: Synthetic epitope
NVNIEPDDES

SEQ ID NO: 31569 - protein, 10 aa, Artificial Sequence
  Description of Artificial Sequence: Synthetic epitope
NVNMGSNSQM

SEQ ID NO: 31570 - protein, 10 aa, Artificial Sequence
  Description of Artificial Sequence: Synthetic epitope
NVNMKTNNQD

SEQ ID NO: 31571 - protein, 10 aa, Artificial Sequence
  Description of Artificial Sequence: Synthetic epitope
NVNTSSIHVN

SEQ ID NO: 31572 - protein, 10 aa, Artificial Sequence
  Description of Artificial Sequence: Synthetic epitope
NVPASKFSLQ

SEQ ID NO: 31573 - protein, 10 aa, Artificial Sequence
  Description of Artificial Sequence: Synthetic epitope
NVPMTGSISH

SEQ ID NO: 31574 - protein, 10 aa, Artificial Sequence
  Description of Artificial Sequence: Synthetic epitope
NVPNDKFTQN

SEQ ID NO: 31575 - protein, 10 aa, Artificial Sequence
  Description of Artificial Sequence: Synthetic epitope
NVPNHNEMFD

SEQ ID NO: 31576 - protein, 10 aa, Artificial Sequence
  Description of Artificial Sequence: Synthetic epitope
NVPQVSSMQM

SEQ ID NO: 31577 - protein, 10 aa, Artificial Sequence
  Description of Artificial Sequence: Synthetic epitope
NVPVSLESKK

SEQ ID NO: 31578 - protein, 10 aa, Artificial Sequence
  Description of Artificial Sequence: Synthetic epitope
NVQEPWDIAL

SEQ ID NO: 31579 - protein, 10 aa, Artificial Sequence
  Description of Artificial Sequence: Synthetic epitope
NVQFQTQSLR

SEQ ID NO: 31580 - protein, 10 aa, Artificial Sequence
  Description of Artificial Sequence: Synthetic epitope
NVQHEQSDGQ

SEQ ID NO: 31581 - protein, 10 aa, Artificial Sequence
  Description of Artificial Sequence: Synthetic epitope
NVQKDNEIEQ

SEQ ID NO: 31582 - protein, 10 aa, Artificial Sequence
  Description of Artificial Sequence: Synthetic epitope
NVQKVVLVSS

SEQ ID NO: 31583 - protein, 10 aa, Artificial Sequence
  Description of Artificial Sequence: Synthetic epitope
NVQLAAKIQH

SEQ ID NO: 31584 - protein, 10 aa, Artificial Sequence
  Description of Artificial Sequence: Synthetic epitope
NVQQKSIIET

SEQ ID NO: 31585 - protein, 10 aa, Artificial Sequence
  Description of Artificial Sequence: Synthetic epitope
NVRIRKYNLS

SEQ ID NO: 31586 - protein, 10 aa, Artificial Sequence
  Description of Artificial Sequence: Synthetic epitope
NVRKSVLLME

SEQ ID NO: 31587 - protein, 10 aa, Artificial Sequence
  Description of Artificial Sequence: Synthetic epitope
NVRSMPIRKD

SEQ ID NO: 31588 - protein, 10 aa, Artificial Sequence
  Description of Artificial Sequence: Synthetic epitope
NVRSMPIRKD

SEQ ID NO: 31589 - protein, 10 aa, Artificial Sequence
  Description of Artificial Sequence: Synthetic epitope
NVRTSLIAEQ

SEQ ID NO: 31590 - protein, 10 aa, Artificial Sequence
  Description of Artificial Sequence: Synthetic epitope
NVSDKQNQAK

SEQ ID NO: 31591 - protein, 10 aa, Artificial Sequence
  Description of Artificial Sequence: Synthetic epitope
NVSDNRTWAD

SEQ ID NO: 31592 - protein, 10 aa, Artificial Sequence
  Description of Artificial Sequence: Synthetic epitope
NVSENKEIVK

SEQ ID NO: 31593 - protein, 10 aa, Artificial Sequence
  Description of Artificial Sequence: Synthetic epitope
NVSERSFDNV

SEQ ID NO: 31594 - protein, 10 aa, Artificial Sequence
  Description of Artificial Sequence: Synthetic epitope
NVSITQLRRP

SEQ ID NO: 31595 - protein, 10 aa, Artificial Sequence
  Description of Artificial Sequence: Synthetic epitope
NVSLDTIYKE

SEQ ID NO: 31596 - protein, 10 aa, Artificial Sequence
  Description of Artificial Sequence: Synthetic epitope
NVSLQSKATS

SEQ ID NO: 31597 - protein, 10 aa, Artificial Sequence
  Description of Artificial Sequence: Synthetic epitope
NVSLTSTETP

SEQ ID NO: 31598 - protein, 10 aa, Artificial Sequence
  Description of Artificial Sequence: Synthetic epitope
NVSLWAHRKM

SEQ ID NO: 31599 - protein, 10 aa, Artificial Sequence
  Description of Artificial Sequence: Synthetic epitope
NVSQVQLITS

SEQ ID NO: 31600 - protein, 10 aa, Artificial Sequence
  Description of Artificial Sequence: Synthetic epitope
NVSSLPYAVP

SEQ ID NO: 31601 - protein, 10 aa, Artificial Sequence
  Description of Artificial Sequence: Synthetic epitope
NVSTISSNNG

SEQ ID NO: 31602 - protein, 10 aa, Artificial Sequence
  Description of Artificial Sequence: Synthetic epitope
NVSVRSRSMM

SEQ ID NO: 31603 - protein, 10 aa, Artificial Sequence
  Description of Artificial Sequence: Synthetic epitope
NVTATLASIN

SEQ ID NO: 31604 - protein, 10 aa, Artificial Sequence
  Description of Artificial Sequence: Synthetic epitope
NVTEESGVGG

SEQ ID NO: 31605 - protein, 10 aa, Artificial Sequence
  Description of Artificial Sequence: Synthetic epitope
NVTLKSSPDL

SEQ ID NO: 31606 - protein, 10 aa, Artificial Sequence
  Description of Artificial Sequence: Synthetic epitope
NVTLTLSLGK

SEQ ID NO: 31607 - protein, 10 aa, Artificial Sequence
  Description of Artificial Sequence: Synthetic epitope
NVTSAVEGIN

SEQ ID NO: 31608 - protein, 10 aa, Artificial Sequence
  Description of Artificial Sequence: Synthetic epitope
NVTSVLFRKK

SEQ ID NO: 31609 - protein, 10 aa, Artificial Sequence
  Description of Artificial Sequence: Synthetic epitope
NVTTSQGATL

SEQ ID NO: 31610 - protein, 10 aa, Artificial Sequence
  Description of Artificial Sequence: Synthetic epitope
NVVAKKSVPH

SEQ ID NO: 31611 - protein, 10 aa, Artificial Sequence
  Description of Artificial Sequence: Synthetic epitope
NVVHKVVFYA

SEQ ID NO: 31612 - protein, 10 aa, Artificial Sequence
  Description of Artificial Sequence: Synthetic epitope
NVVISRLLTA

SEQ ID NO: 31613 - protein, 10 aa, Artificial Sequence
  Description of Artificial Sequence: Synthetic epitope
NVVKTAEISS

SEQ ID NO: 31614 - protein, 10 aa, Artificial Sequence
  Description of Artificial Sequence: Synthetic epitope
NVVLPLNEQT

SEQ ID NO: 31615 - protein, 10 aa, Artificial Sequence
  Description of Artificial Sequence: Synthetic epitope
NVVSTALNDT

SEQ ID NO: 31616 - protein, 10 aa, Artificial Sequence
  Description of Artificial Sequence: Synthetic epitope
NVVTDAALAF

SEQ ID NO: 31617 - protein, 10 aa, Artificial Sequence
  Description of Artificial Sequence: Synthetic epitope
NVVTSAISLP

SEQ ID NO: 31618 - protein, 10 aa, Artificial Sequence
  Description of Artificial Sequence: Synthetic epitope
NVWQARVSSM

SEQ ID NO: 31619 - protein, 10 aa, Artificial Sequence
  Description of Artificial Sequence: Synthetic epitope
NVYAPNYSGS

SEQ ID NO: 31620 - protein, 10 aa, Artificial Sequence
  Description of Artificial Sequence: Synthetic epitope
NVYERSKQHI

SEQ ID NO: 31621 - protein, 10 aa, Artificial Sequence
  Description of Artificial Sequence: Synthetic epitope
NVYKRFYPAE

SEQ ID NO: 31622 - protein, 10 aa, Artificial Sequence
  Description of Artificial Sequence: Synthetic epitope
NVYLMKRSPR

SEQ ID NO: 31623 - protein, 10 aa, Artificial Sequence
  Description of Artificial Sequence: Synthetic epitope
NWGALNQSKQ

SEQ ID NO: 31624 - protein, 10 aa, Artificial Sequence
  Description of Artificial Sequence: Synthetic epitope
NWIANVVSET

SEQ ID NO: 31625 - protein, 10 aa, Artificial Sequence
  Description of Artificial Sequence: Synthetic epitope
NWIIMTIKGA

SEQ ID NO: 31626 - protein, 10 aa, Artificial Sequence
  Description of Artificial Sequence: Synthetic epitope
NWIKATIKSE

SEQ ID NO: 31627 - protein, 10 aa, Artificial Sequence
  Description of Artificial Sequence: Synthetic epitope
NWINQTEAQT

SEQ ID NO: 31628 - protein, 10 aa, Artificial Sequence
  Description of Artificial Sequence: Synthetic epitope
NWKSKKEEGQ

SEQ ID NO: 31629 - protein, 10 aa, Artificial Sequence
  Description of Artificial Sequence: Synthetic epitope
NWLAAEAALE

SEQ ID NO: 31630 - protein, 10 aa, Artificial Sequence
  Description of Artificial Sequence: Synthetic epitope
NWLIQTKITD

SEQ ID NO: 31631 - protein, 10 aa, Artificial Sequence
  Description of Artificial Sequence: Synthetic epitope
NWLQAMVKKE

SEQ ID NO: 31632 - protein, 10 aa, Artificial Sequence
  Description of Artificial Sequence: Synthetic epitope
NWLVKNSYEG

SEQ ID NO: 31633 - protein, 10 aa, Artificial Sequence
  Description of Artificial Sequence: Synthetic epitope
NWNAIDAEEF

SEQ ID NO: 31634 - protein, 10 aa, Artificial Sequence
  Description of Artificial Sequence: Synthetic epitope
NWQTAFNRQA

SEQ ID NO: 31635 - protein, 10 aa, Artificial Sequence
  Description of Artificial Sequence: Synthetic epitope
NWREIVVQDK

SEQ ID NO: 31636 - protein, 10 aa, Artificial Sequence
  Description of Artificial Sequence: Synthetic epitope
NWRLNNVTGI

SEQ ID NO: 31637 - protein, 10 aa, Artificial Sequence
  Description of Artificial Sequence: Synthetic epitope
NWSSRQAVSS

SEQ ID NO: 31638 - protein, 10 aa, Artificial Sequence
  Description of Artificial Sequence: Synthetic epitope
NWSVVQVAKA

SEQ ID NO: 31639 - protein, 10 aa, Artificial Sequence
  Description of Artificial Sequence: Synthetic epitope
NWTLANSGEQ

SEQ ID NO: 31640 - protein, 10 aa, Artificial Sequence
  Description of Artificial Sequence: Synthetic epitope
NWVQFLVIKN

SEQ ID NO: 31641 - protein, 10 aa, Artificial Sequence
  Description of Artificial Sequence: Synthetic epitope
NWWRPNFEPP

SEQ ID NO: 31642 - protein, 10 aa, Artificial Sequence
  Description of Artificial Sequence: Synthetic epitope
NYADVSSRAN

SEQ ID NO: 31643 - protein, 10 aa, Artificial Sequence
  Description of Artificial Sequence: Synthetic epitope
NYAKKNVEQN

SEQ ID NO: 31644 - protein, 10 aa, Artificial Sequence
  Description of Artificial Sequence: Synthetic epitope
NYATRIVTLE

SEQ ID NO: 31645 - protein, 10 aa, Artificial Sequence
  Description of Artificial Sequence: Synthetic epitope
NYDSSMVYYQ

SEQ ID NO: 31646 - protein, 10 aa, Artificial Sequence
  Description of Artificial Sequence: Synthetic epitope
NYEIKNEADR

SEQ ID NO: 31647 - protein, 10 aa, Artificial Sequence
  Description of Artificial Sequence: Synthetic epitope
NYEKATNANP

SEQ ID NO: 31648 - protein, 10 aa, Artificial Sequence
  Description of Artificial Sequence: Synthetic epitope
NYFASTVNRE

SEQ ID NO: 31649 - protein, 10 aa, Artificial Sequence
  Description of Artificial Sequence: Synthetic epitope
NYFRLTILSE

SEQ ID NO: 31650 - protein, 10 aa, Artificial Sequence
  Description of Artificial Sequence: Synthetic epitope
NYFSPRESTD

SEQ ID NO: 31651 - protein, 10 aa, Artificial Sequence
  Description of Artificial Sequence: Synthetic epitope
NYFVSHTKKA

SEQ ID NO: 31652 - protein, 10 aa, Artificial Sequence
  Description of Artificial Sequence: Synthetic epitope
NYIKIEGQSK

SEQ ID NO: 31653 - protein, 10 aa, Artificial Sequence
  Description of Artificial Sequence: Synthetic epitope
NYIKTSEVVR

SEQ ID NO: 31654 - protein, 10 aa, Artificial Sequence
  Description of Artificial Sequence: Synthetic epitope
NYINYGTTKS

SEQ ID NO: 31655 - protein, 10 aa, Artificial Sequence
  Description of Artificial Sequence: Synthetic epitope
NYIYEDAYDK

SEQ ID NO: 31656 - protein, 10 aa, Artificial Sequence
  Description of Artificial Sequence: Synthetic epitope
NYKIEHTETD

SEQ ID NO: 31657 - protein, 10 aa, Artificial Sequence
  Description of Artificial Sequence: Synthetic epitope
NYKINYKVHY

SEQ ID NO: 31658 - protein, 10 aa, Artificial Sequence
  Description of Artificial Sequence: Synthetic epitope
NYLSVSLSEH

SEQ ID NO: 31659 - protein, 10 aa, Artificial Sequence
  Description of Artificial Sequence: Synthetic epitope
NYMMNVIEVD

SEQ ID NO: 31660 - protein, 10 aa, Artificial Sequence
  Description of Artificial Sequence: Synthetic epitope
NYMRNEILDK

SEQ ID NO: 31661 - protein, 10 aa, Artificial Sequence
  Description of Artificial Sequence: Synthetic epitope
NYNSHNSQSN

SEQ ID NO: 31662 - protein, 10 aa, Artificial Sequence
  Description of Artificial Sequence: Synthetic epitope
NYNVARVSGV

SEQ ID NO: 31663 - protein, 10 aa, Artificial Sequence
  Description of Artificial Sequence: Synthetic epitope
NYPEDSLLSS

SEQ ID NO: 31664 - protein, 10 aa, Artificial Sequence
  Description of Artificial Sequence: Synthetic epitope
NYSAPLIVTS

SEQ ID NO: 31665 - protein, 10 aa, Artificial Sequence
  Description of Artificial Sequence: Synthetic epitope
NYSASSMAAQ

SEQ ID NO: 31666 - protein, 10 aa, Artificial Sequence
  Description of Artificial Sequence: Synthetic epitope
NYSIFNREND

SEQ ID NO: 31667 - protein, 10 aa, Artificial Sequence
  Description of Artificial Sequence: Synthetic epitope
NYSKKSVLRE

SEQ ID NO: 31668 - protein, 10 aa, Artificial Sequence
  Description of Artificial Sequence: Synthetic epitope
NYSLEAVKVK

SEQ ID NO: 31669 - protein, 10 aa, Artificial Sequence
  Description of Artificial Sequence: Synthetic epitope
NYSMVNTTNM

SEQ ID NO: 31670 - protein, 10 aa, Artificial Sequence
  Description of Artificial Sequence: Synthetic epitope
NYSRALEGEG

SEQ ID NO: 31671 - protein, 10 aa, Artificial Sequence
  Description of Artificial Sequence: Synthetic epitope
NYSSEITNSE

SEQ ID NO: 31672 - protein, 10 aa, Artificial Sequence
  Description of Artificial Sequence: Synthetic epitope
NYSTAHMLKN

SEQ ID NO: 31673 - protein, 10 aa, Artificial Sequence
  Description of Artificial Sequence: Synthetic epitope
NYSTGYDVKP

SEQ ID NO: 31674 - protein, 10 aa, Artificial Sequence
  Description of Artificial Sequence: Synthetic epitope
NYSVESAVAD

SEQ ID NO: 31675 - protein, 10 aa, Artificial Sequence
  Description of Artificial Sequence: Synthetic epitope
NYTGNVGNDA

SEQ ID NO: 31676 - protein, 10 aa, Artificial Sequence
  Description of Artificial Sequence: Synthetic epitope
NYTIITNKSQ

SEQ ID NO: 31677 - protein, 10 aa, Artificial Sequence
  Description of Artificial Sequence: Synthetic epitope
NYTPQLSEAE

SEQ ID NO: 31678 - protein, 10 aa, Artificial Sequence
  Description of Artificial Sequence: Synthetic epitope
NYTRQRTEYY

SEQ ID NO: 31679 - protein, 10 aa, Artificial Sequence
  Description of Artificial Sequence: Synthetic epitope
NYVLARRIEL

SEQ ID NO: 31680 - protein, 10 aa, Artificial Sequence
  Description of Artificial Sequence: Synthetic epitope
NYVLSEKSST

SEQ ID NO: 31681 - protein, 10 aa, Artificial Sequence
  Description of Artificial Sequence: Synthetic epitope
NYVNERKSEQ

SEQ ID NO: 31682 - protein, 10 aa, Artificial Sequence
  Description of Artificial Sequence: Synthetic epitope
NYVTVESGRR

SEQ ID NO: 31683 - protein, 10 aa, Artificial Sequence
  Description of Artificial Sequence: Synthetic epitope
NYWRKSYESS

SEQ ID NO: 31684 - protein, 10 aa, Artificial Sequence
  Description of Artificial Sequence: Synthetic epitope
NYYASQKKTF

SEQ ID NO: 31685 - protein, 10 aa, Artificial Sequence
  Description of Artificial Sequence: Synthetic epitope
NYYPSEYAEI

SEQ ID NO: 31686 - protein, 10 aa, Artificial Sequence
  Description of Artificial Sequence: Synthetic epitope
PAAEASEAMP

SEQ ID NO: 31687 - protein, 10 aa, Artificial Sequence
  Description of Artificial Sequence: Synthetic epitope
PAAEGLDAKE

SEQ ID NO: 31688 - protein, 10 aa, Artificial Sequence
  Description of Artificial Sequence: Synthetic epitope
PAAENTEILH

SEQ ID NO: 31689 - protein, 10 aa, Artificial Sequence
  Description of Artificial Sequence: Synthetic epitope
PAAHATSSAP

SEQ ID NO: 31690 - protein, 10 aa, Artificial Sequence
  Description of Artificial Sequence: Synthetic epitope
PAAIILKVAL

SEQ ID NO: 31691 - protein, 10 aa, Artificial Sequence
  Description of Artificial Sequence: Synthetic epitope
PAAISAQSIL

SEQ ID NO: 31692 - protein, 10 aa, Artificial Sequence
  Description of Artificial Sequence: Synthetic epitope
PAAITTLARS

SEQ ID NO: 31693 - protein, 10 aa, Artificial Sequence
  Description of Artificial Sequence: Synthetic epitope
PAALESAFSS

SEQ ID NO: 31694 - protein, 10 aa, Artificial Sequence
  Description of Artificial Sequence: Synthetic epitope
PAALKAAQKT

SEQ ID NO: 31695 - protein, 10 aa, Artificial Sequence
  Description of Artificial Sequence: Synthetic epitope
PAALTSDAEQ

SEQ ID NO: 31696 - protein, 10 aa, Artificial Sequence
  Description of Artificial Sequence: Synthetic epitope
PAANEIATNK

SEQ ID NO: 31697 - protein, 10 aa, Artificial Sequence
  Description of Artificial Sequence: Synthetic epitope
PAANTDRRAE

SEQ ID NO: 31698 - protein, 10 aa, Artificial Sequence
  Description of Artificial Sequence: Synthetic epitope
PAAQLERAED

SEQ ID NO: 31699 - protein, 10 aa, Artificial Sequence
  Description of Artificial Sequence: Synthetic epitope
PAAQVALAKQ

SEQ ID NO: 31700 - protein, 10 aa, Artificial Sequence
  Description of Artificial Sequence: Synthetic epitope
PAARREPAVA

SEQ ID NO: 31701 - protein, 10 aa, Artificial Sequence
  Description of Artificial Sequence: Synthetic epitope
PAARVAIQTM

SEQ ID NO: 31702 - protein, 10 aa, Artificial Sequence
  Description of Artificial Sequence: Synthetic epitope
PAASERLATA

SEQ ID NO: 31703 - protein, 10 aa, Artificial Sequence
  Description of Artificial Sequence: Synthetic epitope
PAASSAEAQS

SEQ ID NO: 31704 - protein, 10 aa, Artificial Sequence
  Description of Artificial Sequence: Synthetic epitope
PAASSASASQ

SEQ ID NO: 31705 - protein, 10 aa, Artificial Sequence
  Description of Artificial Sequence: Synthetic epitope
PAASTTQDSQ

SEQ ID NO: 31706 - protein, 10 aa, Artificial Sequence
  Description of Artificial Sequence: Synthetic epitope
PAATLKLRRQ

SEQ ID NO: 31707 - protein, 10 aa, Artificial Sequence
  Description of Artificial Sequence: Synthetic epitope
PAATLSLLAG

SEQ ID NO: 31708 - protein, 10 aa, Artificial Sequence
  Description of Artificial Sequence: Synthetic epitope
PAATSATSVH

SEQ ID NO: 31709 - protein, 10 aa, Artificial Sequence
  Description of Artificial Sequence: Synthetic epitope
PAATSILHKA

SEQ ID NO: 31710 - protein, 10 aa, Artificial Sequence
  Description of Artificial Sequence: Synthetic epitope
PAATTAKAGD

SEQ ID NO: 31711 - protein, 10 aa, Artificial Sequence
  Description of Artificial Sequence: Synthetic epitope
PAATTSTTQH

SEQ ID NO: 31712 - protein, 10 aa, Artificial Sequence
  Description of Artificial Sequence: Synthetic epitope
PAAVKLTYQD

SEQ ID NO: 31713 - protein, 10 aa, Artificial Sequence
  Description of Artificial Sequence: Synthetic epitope
PAAVMELVPS

SEQ ID NO: 31714 - protein, 10 aa, Artificial Sequence
  Description of Artificial Sequence: Synthetic epitope
PAAVQVGIAP

SEQ ID NO: 31715 - protein, 10 aa, Artificial Sequence
  Description of Artificial Sequence: Synthetic epitope
PAAVSASGTV

SEQ ID NO: 31716 - protein, 10 aa, Artificial Sequence
  Description of Artificial Sequence: Synthetic epitope
PAAVSRIVAL

SEQ ID NO: 31717 - protein, 10 aa, Artificial Sequence
  Description of Artificial Sequence: Synthetic epitope
PAAVSSAESS

SEQ ID NO: 31718 - protein, 10 aa, Artificial Sequence
  Description of Artificial Sequence: Synthetic epitope
PAAVSSAHPV

SEQ ID NO: 31719 - protein, 10 aa, Artificial Sequence
  Description of Artificial Sequence: Synthetic epitope
PAAVTSQSPV

SEQ ID NO: 31720 - protein, 10 aa, Artificial Sequence
  Description of Artificial Sequence: Synthetic epitope
PADASEAHES

SEQ ID NO: 31721 - protein, 10 aa, Artificial Sequence
  Description of Artificial Sequence: Synthetic epitope
PADFQNSQSP

SEQ ID NO: 31722 - protein, 10 aa, Artificial Sequence
  Description of Artificial Sequence: Synthetic epitope
PADFTAEAHA

SEQ ID NO: 31723 - protein, 10 aa, Artificial Sequence
  Description of Artificial Sequence: Synthetic epitope
PADHLSKVPE

SEQ ID NO: 31724 - protein, 10 aa, Artificial Sequence
  Description of Artificial Sequence: Synthetic epitope
PADILYEDQQ

SEQ ID NO: 31725 - protein, 10 aa, Artificial Sequence
  Description of Artificial Sequence: Synthetic epitope
PADLQVAPTQ

SEQ ID NO: 31726 - protein, 10 aa, Artificial Sequence
  Description of Artificial Sequence: Synthetic epitope
PADSRTEASE

SEQ ID NO: 31727 - protein, 10 aa, Artificial Sequence
  Description of Artificial Sequence: Synthetic epitope
PADTIKANQG

SEQ ID NO: 31728 - protein, 10 aa, Artificial Sequence
  Description of Artificial Sequence: Synthetic epitope
PAEAAVLRQR

SEQ ID NO: 31729 - protein, 10 aa, Artificial Sequence
  Description of Artificial Sequence: Synthetic epitope
PAEAEKGPSL

SEQ ID NO: 31730 - protein, 10 aa, Artificial Sequence
  Description of Artificial Sequence: Synthetic epitope
PAEAMNMKPE

SEQ ID NO: 31731 - protein, 10 aa, Artificial Sequence
  Description of Artificial Sequence: Synthetic epitope
PAEAQSASSD

SEQ ID NO: 31732 - protein, 10 aa, Artificial Sequence
  Description of Artificial Sequence: Synthetic epitope
PAEAYAEAVQ

SEQ ID NO: 31733 - protein, 10 aa, Artificial Sequence
  Description of Artificial Sequence: Synthetic epitope
PAEEATSLEG

SEQ ID NO: 31734 - protein, 10 aa, Artificial Sequence
  Description of Artificial Sequence: Synthetic epitope
PAEEKQIDDA

SEQ ID NO: 31735 - protein, 10 aa, Artificial Sequence
  Description of Artificial Sequence: Synthetic epitope
PAELYKQANN

SEQ ID NO: 31736 - protein, 10 aa, Artificial Sequence
  Description of Artificial Sequence: Synthetic epitope
PAENLIKSDS

SEQ ID NO: 31737 - protein, 10 aa, Artificial Sequence
  Description of Artificial Sequence: Synthetic epitope
PAENSMLVQK

SEQ ID NO: 31738 - protein, 10 aa, Artificial Sequence
  Description of Artificial Sequence: Synthetic epitope
PAEPEAKEDE

SEQ ID NO: 31739 - protein, 10 aa, Artificial Sequence
  Description of Artificial Sequence: Synthetic epitope
PAEPESVSSP

SEQ ID NO: 31740 - protein, 10 aa, Artificial Sequence
  Description of Artificial Sequence: Synthetic epitope
PAERIQEIQK

SEQ ID NO: 31741 - protein, 10 aa, Artificial Sequence
  Description of Artificial Sequence: Synthetic epitope
PAERKTSEHS

SEQ ID NO: 31742 - protein, 10 aa, Artificial Sequence
  Description of Artificial Sequence: Synthetic epitope
PAERKTSEHS

SEQ ID NO: 31743 - protein, 10 aa, Artificial Sequence
  Description of Artificial Sequence: Synthetic epitope
PAERSQSANQ

SEQ ID NO: 31744 - protein, 10 aa, Artificial Sequence
  Description of Artificial Sequence: Synthetic epitope
PAESLSEFKP

SEQ ID NO: 31745 - protein, 10 aa, Artificial Sequence
  Description of Artificial Sequence: Synthetic epitope
PAETLLSDSI

SEQ ID NO: 31746 - protein, 10 aa, Artificial Sequence
  Description of Artificial Sequence: Synthetic epitope
PAETTGQARR

SEQ ID NO: 31747 - protein, 10 aa, Artificial Sequence
  Description of Artificial Sequence: Synthetic epitope
PAEVKVSKEI

SEQ ID NO: 31748 - protein, 10 aa, Artificial Sequence
  Description of Artificial Sequence: Synthetic epitope
PAEVTTKSQI

SEQ ID NO: 31749 - protein, 10 aa, Artificial Sequence
  Description of Artificial Sequence: Synthetic epitope
PAFKDLIAKV

SEQ ID NO: 31750 - protein, 10 aa, Artificial Sequence
  Description of Artificial Sequence: Synthetic epitope
PAFLNMRKRK

SEQ ID NO: 31751 - protein, 10 aa, Artificial Sequence
  Description of Artificial Sequence: Synthetic epitope
PAFMSATPGD

SEQ ID NO: 31752 - protein, 10 aa, Artificial Sequence
  Description of Artificial Sequence: Synthetic epitope
PAFQSIVGAE

SEQ ID NO: 31753 - protein, 10 aa, Artificial Sequence
  Description of Artificial Sequence: Synthetic epitope
PAFSMLNDSD

SEQ ID NO: 31754 - protein, 10 aa, Artificial Sequence
  Description of Artificial Sequence: Synthetic epitope
PAGADSLRAQ

SEQ ID NO: 31755 - protein, 10 aa, Artificial Sequence
  Description of Artificial Sequence: Synthetic epitope
PAGAGMSTAM

SEQ ID NO: 31756 - protein, 10 aa, Artificial Sequence
  Description of Artificial Sequence: Synthetic epitope
PAGGTLDDKP

SEQ ID NO: 31757 - protein, 10 aa, Artificial Sequence
  Description of Artificial Sequence: Synthetic epitope
PAGKTKSMQE

SEQ ID NO: 31758 - protein, 10 aa, Artificial Sequence
  Description of Artificial Sequence: Synthetic epitope
PAGLISASRK

SEQ ID NO: 31759 - protein, 10 aa, Artificial Sequence
  Description of Artificial Sequence: Synthetic epitope
PAGLKKSSKK

SEQ ID NO: 31760 - protein, 10 aa, Artificial Sequence
  Description of Artificial Sequence: Synthetic epitope
PAGNVESTGS

SEQ ID NO: 31761 - protein, 10 aa, Artificial Sequence
  Description of Artificial Sequence: Synthetic epitope
PAGRLSQGSG

SEQ ID NO: 31762 - protein, 10 aa, Artificial Sequence
  Description of Artificial Sequence: Synthetic epitope
PAGRTSSRSQ

SEQ ID NO: 31763 - protein, 10 aa, Artificial Sequence
  Description of Artificial Sequence: Synthetic epitope
PAGRVIKPQV

SEQ ID NO: 31764 - protein, 10 aa, Artificial Sequence
  Description of Artificial Sequence: Synthetic epitope
PAGSSQAEEQ

SEQ ID NO: 31765 - protein, 10 aa, Artificial Sequence
  Description of Artificial Sequence: Synthetic epitope
PAGTSVQAQP

SEQ ID NO: 31766 - protein, 10 aa, Artificial Sequence
  Description of Artificial Sequence: Synthetic epitope
PAHAAQERKQ

SEQ ID NO: 31767 - protein, 10 aa, Artificial Sequence
  Description of Artificial Sequence: Synthetic epitope
PAHATTSSHA

SEQ ID NO: 31768 - protein, 10 aa, Artificial Sequence
  Description of Artificial Sequence: Synthetic epitope
PAHNSTDLDP

SEQ ID NO: 31769 - protein, 10 aa, Artificial Sequence
  Description of Artificial Sequence: Synthetic epitope
PAIDTVETGR

SEQ ID NO: 31770 - protein, 10 aa, Artificial Sequence
  Description of Artificial Sequence: Synthetic epitope
PAIEKNIVKK

SEQ ID NO: 31771 - protein, 10 aa, Artificial Sequence
  Description of Artificial Sequence: Synthetic epitope
PAIKQAVTKA

SEQ ID NO: 31772 - protein, 10 aa, Artificial Sequence
  Description of Artificial Sequence: Synthetic epitope
PAIKTTIKHP

SEQ ID NO: 31773 - protein, 10 aa, Artificial Sequence
  Description of Artificial Sequence: Synthetic epitope
PAIMRAVQTR

SEQ ID NO: 31774 - protein, 10 aa, Artificial Sequence
  Description of Artificial Sequence: Synthetic epitope
PAIMSQPDVL

SEQ ID NO: 31775 - protein, 10 aa, Artificial Sequence
  Description of Artificial Sequence: Synthetic epitope
PAIQNAHKNS

SEQ ID NO: 31776 - protein, 10 aa, Artificial Sequence
  Description of Artificial Sequence: Synthetic epitope
PAKAGSSTAG

SEQ ID NO: 31777 - protein, 10 aa, Artificial Sequence
  Description of Artificial Sequence: Synthetic epitope
PAKAIVVKKV

SEQ ID NO: 31778 - protein, 10 aa, Artificial Sequence
  Description of Artificial Sequence: Synthetic epitope
PAKAKLTKLK

SEQ ID NO: 31779 - protein, 10 aa, Artificial Sequence
  Description of Artificial Sequence: Synthetic epitope
PAKALEGQGA

SEQ ID NO: 31780 - protein, 10 aa, Artificial Sequence
  Description of Artificial Sequence: Synthetic epitope
PAKASSASAP

SEQ ID NO: 31781 - protein, 10 aa, Artificial Sequence
  Description of Artificial Sequence: Synthetic epitope
PAKGEASTQT

SEQ ID NO: 31782 - protein, 10 aa, Artificial Sequence
  Description of Artificial Sequence: Synthetic epitope
PAKGYAKIKE

SEQ ID NO: 31783 - protein, 10 aa, Artificial Sequence
  Description of Artificial Sequence: Synthetic epitope
PAKKAKGAAK

SEQ ID NO: 31784 - protein, 10 aa, Artificial Sequence
  Description of Artificial Sequence: Synthetic epitope
PAKKHPSASM

SEQ ID NO: 31785 - protein, 10 aa, Artificial Sequence
  Description of Artificial Sequence: Synthetic epitope
PAKLEKLQYK

SEQ ID NO: 31786 - protein, 10 aa, Artificial Sequence
  Description of Artificial Sequence: Synthetic epitope
PAKLVQSTLS

SEQ ID NO: 31787 - protein, 10 aa, Artificial Sequence
  Description of Artificial Sequence: Synthetic epitope
PAKMLLDPAA

SEQ ID NO: 31788 - protein, 10 aa, Artificial Sequence
  Description of Artificial Sequence: Synthetic epitope
PAKNSESVDQ

SEQ ID NO: 31789 - protein, 10 aa, Artificial Sequence
  Description of Artificial Sequence: Synthetic epitope
PAKNSNSNNT

SEQ ID NO: 31790 - protein, 10 aa, Artificial Sequence
  Description of Artificial Sequence: Synthetic epitope
PAKQPLQQAA

SEQ ID NO: 31791 - protein, 10 aa, Artificial Sequence
  Description of Artificial Sequence: Synthetic epitope
PAKRVPLSSQ

SEQ ID NO: 31792 - protein, 10 aa, Artificial Sequence
  Description of Artificial Sequence: Synthetic epitope
PAKSENVDVG

SEQ ID NO: 31793 - protein, 10 aa, Artificial Sequence
  Description of Artificial Sequence: Synthetic epitope
PAKSSTLRDE

SEQ ID NO: 31794 - protein, 10 aa, Artificial Sequence
  Description of Artificial Sequence: Synthetic epitope
PAKTEPIKER

SEQ ID NO: 31795 - protein, 10 aa, Artificial Sequence
  Description of Artificial Sequence: Synthetic epitope
PAKVNRTKQR

SEQ ID NO: 31796 - protein, 10 aa, Artificial Sequence
  Description of Artificial Sequence: Synthetic epitope
PAKVSKNSET

SEQ ID NO: 31797 - protein, 10 aa, Artificial Sequence
  Description of Artificial Sequence: Synthetic epitope
PALAAELEAV

SEQ ID NO: 31798 - protein, 10 aa, Artificial Sequence
  Description of Artificial Sequence: Synthetic epitope
PALAALTPLS

SEQ ID NO: 31799 - protein, 10 aa, Artificial Sequence
  Description of Artificial Sequence: Synthetic epitope
PALEASSERR

SEQ ID NO: 31800 - protein, 10 aa, Artificial Sequence
  Description of Artificial Sequence: Synthetic epitope
PALEWNMASS

SEQ ID NO: 31801 - protein, 10 aa, Artificial Sequence
  Description of Artificial Sequence: Synthetic epitope
PALGQLVKSE

SEQ ID NO: 31802 - protein, 10 aa, Artificial Sequence
  Description of Artificial Sequence: Synthetic epitope
PALLASAPEA

SEQ ID NO: 31803 - protein, 10 aa, Artificial Sequence
  Description of Artificial Sequence: Synthetic epitope
PALLTSVTPP

SEQ ID NO: 31804 - protein, 10 aa, Artificial Sequence
  Description of Artificial Sequence: Synthetic epitope
PALQLVSSKR

SEQ ID NO: 31805 - protein, 10 aa, Artificial Sequence
  Description of Artificial Sequence: Synthetic epitope
PALQPKEQQD

SEQ ID NO: 31806 - protein, 10 aa, Artificial Sequence
  Description of Artificial Sequence: Synthetic epitope
PALRLAGLPT

SEQ ID NO: 31807 - protein, 10 aa, Artificial Sequence
  Description of Artificial Sequence: Synthetic epitope
PALSQLQDSG

SEQ ID NO: 31808 - protein, 10 aa, Artificial Sequence
  Description of Artificial Sequence: Synthetic epitope
PALSSKASAE

SEQ ID NO: 31809 - protein, 10 aa, Artificial Sequence
  Description of Artificial Sequence: Synthetic epitope
PALSVESLSS

SEQ ID NO: 31810 - protein, 10 aa, Artificial Sequence
  Description of Artificial Sequence: Synthetic epitope
PALSVTGPIT

SEQ ID NO: 31811 - protein, 10 aa, Artificial Sequence
  Description of Artificial Sequence: Synthetic epitope
PALTQVEAAI

SEQ ID NO: 31812 - protein, 10 aa, Artificial Sequence
  Description of Artificial Sequence: Synthetic epitope
PALVDSKRRV

SEQ ID NO: 31813 - protein, 10 aa, Artificial Sequence
  Description of Artificial Sequence: Synthetic epitope
PALVRVIKTT

SEQ ID NO: 31814 - protein, 10 aa, Artificial Sequence
  Description of Artificial Sequence: Synthetic epitope
PALVSLKDKK

SEQ ID NO: 31815 - protein, 10 aa, Artificial Sequence
  Description of Artificial Sequence: Synthetic epitope
PAMAKSLTID

SEQ ID NO: 31816 - protein, 10 aa, Artificial Sequence
  Description of Artificial Sequence: Synthetic epitope
PAMATSAEKR

SEQ ID NO: 31817 - protein, 10 aa, Artificial Sequence
  Description of Artificial Sequence: Synthetic epitope
PAMESAKTLS

SEQ ID NO: 31818 - protein, 10 aa, Artificial Sequence
  Description of Artificial Sequence: Synthetic epitope
PAMESSQIVS

SEQ ID NO: 31819 - protein, 10 aa, Artificial Sequence
  Description of Artificial Sequence: Synthetic epitope
PAMGESAAGA

SEQ ID NO: 31820 - protein, 10 aa, Artificial Sequence
  Description of Artificial Sequence: Synthetic epitope
PAMKAVNEQG

SEQ ID NO: 31821 - protein, 10 aa, Artificial Sequence
  Description of Artificial Sequence: Synthetic epitope
PAMKKQMAIL

SEQ ID NO: 31822 - protein, 10 aa, Artificial Sequence
  Description of Artificial Sequence: Synthetic epitope
PAMLDEAVDR

SEQ ID NO: 31823 - protein, 10 aa, Artificial Sequence
  Description of Artificial Sequence: Synthetic epitope
PAMNQNEVQE

SEQ ID NO: 31824 - protein, 10 aa, Artificial Sequence
  Description of Artificial Sequence: Synthetic epitope
PAMQLASKDR

SEQ ID NO: 31825 - protein, 10 aa, Artificial Sequence
  Description of Artificial Sequence: Synthetic epitope
PAMSAARKGR

SEQ ID NO: 31826 - protein, 10 aa, Artificial Sequence
  Description of Artificial Sequence: Synthetic epitope
PAMSTLLDIK

SEQ ID NO: 31827 - protein, 10 aa, Artificial Sequence
  Description of Artificial Sequence: Synthetic epitope
PAMTKNNHGH

SEQ ID NO: 31828 - protein, 10 aa, Artificial Sequence
  Description of Artificial Sequence: Synthetic epitope
PANAIEQQYE

SEQ ID NO: 31829 - protein, 10 aa, Artificial Sequence
  Description of Artificial Sequence: Synthetic epitope
PANEAHVSAN

SEQ ID NO: 31830 - protein, 10 aa, Artificial Sequence
  Description of Artificial Sequence: Synthetic epitope
PANEQESAEP

SEQ ID NO: 31831 - protein, 10 aa, Artificial Sequence
  Description of Artificial Sequence: Synthetic epitope
PANQELSSNI

SEQ ID NO: 31832 - protein, 10 aa, Artificial Sequence
  Description of Artificial Sequence: Synthetic epitope
PANQSAEASA

SEQ ID NO: 31833 - protein, 10 aa, Artificial Sequence
  Description of Artificial Sequence: Synthetic epitope
PANREFKSEK

SEQ ID NO: 31834 - protein, 10 aa, Artificial Sequence
  Description of Artificial Sequence: Synthetic epitope
PANTTVSTIK

SEQ ID NO: 31835 - protein, 10 aa, Artificial Sequence
  Description of Artificial Sequence: Synthetic epitope
PANVAGRETD

SEQ ID NO: 31836 - protein, 10 aa, Artificial Sequence
  Description of Artificial Sequence: Synthetic epitope
PAPLSSNSSA

SEQ ID NO: 31837 - protein, 10 aa, Artificial Sequence
  Description of Artificial Sequence: Synthetic epitope
PAPMATSQPE

SEQ ID NO: 31838 - protein, 10 aa, Artificial Sequence
  Description of Artificial Sequence: Synthetic epitope
PAPMSTVLYN

SEQ ID NO: 31839 - protein, 10 aa, Artificial Sequence
  Description of Artificial Sequence: Synthetic epitope
PAPSANNTAS

SEQ ID NO: 31840 - protein, 10 aa, Artificial Sequence
  Description of Artificial Sequence: Synthetic epitope
PAPSMAVVAV

SEQ ID NO: 31841 - protein, 10 aa, Artificial Sequence
  Description of Artificial Sequence: Synthetic epitope
PAPSTMSKAE

SEQ ID NO: 31842 - protein, 10 aa, Artificial Sequence
  Description of Artificial Sequence: Synthetic epitope
PAPTQLSQDQ

SEQ ID NO: 31843 - protein, 10 aa, Artificial Sequence
  Description of Artificial Sequence: Synthetic epitope
PAQALGQAAQ

SEQ ID NO: 31844 - protein, 10 aa, Artificial Sequence
  Description of Artificial Sequence: Synthetic epitope
PAQASATPAS

SEQ ID NO: 31845 - protein, 10 aa, Artificial Sequence
  Description of Artificial Sequence: Synthetic epitope
PAQDIKALFV

SEQ ID NO: 31846 - protein, 10 aa, Artificial Sequence
  Description of Artificial Sequence: Synthetic epitope
PAQEKVKEGK

SEQ ID NO: 31847 - protein, 10 aa, Artificial Sequence
  Description of Artificial Sequence: Synthetic epitope
PAQESLSGSE

SEQ ID NO: 31848 - protein, 10 aa, Artificial Sequence
  Description of Artificial Sequence: Synthetic epitope
PAQHDPPQSS

SEQ ID NO: 31849 - protein, 10 aa, Artificial Sequence
  Description of Artificial Sequence: Synthetic epitope
PAQKHWVLQS

SEQ ID NO: 31850 - protein, 10 aa, Artificial Sequence
  Description of Artificial Sequence: Synthetic epitope
PAQLKVLTMP

SEQ ID NO: 31851 - protein, 10 aa, Artificial Sequence
  Description of Artificial Sequence: Synthetic epitope
PAQLQLVREQ

SEQ ID NO: 31852 - protein, 10 aa, Artificial Sequence
  Description of Artificial Sequence: Synthetic epitope
PAQLVMLKHL

SEQ ID NO: 31853 - protein, 10 aa, Artificial Sequence
  Description of Artificial Sequence: Synthetic epitope
PAQMSTLHVS

SEQ ID NO: 31854 - protein, 10 aa, Artificial Sequence
  Description of Artificial Sequence: Synthetic epitope
PAQPHAHAHP

SEQ ID NO: 31855 - protein, 10 aa, Artificial Sequence
  Description of Artificial Sequence: Synthetic epitope
PAQQVETEGV

SEQ ID NO: 31856 - protein, 10 aa, Artificial Sequence
  Description of Artificial Sequence: Synthetic epitope
PAQRKADLDE

SEQ ID NO: 31857 - protein, 10 aa, Artificial Sequence
  Description of Artificial Sequence: Synthetic epitope
PAQSTLQTKH

SEQ ID NO: 31858 - protein, 10 aa, Artificial Sequence
  Description of Artificial Sequence: Synthetic epitope
PAQTFSSAPV

SEQ ID NO: 31859 - protein, 10 aa, Artificial Sequence
  Description of Artificial Sequence: Synthetic epitope
PAQTISTEFA

SEQ ID NO: 31860 - protein, 10 aa, Artificial Sequence
  Description of Artificial Sequence: Synthetic epitope
PAQTSLLTNL

SEQ ID NO: 31861 - protein, 10 aa, Artificial Sequence
  Description of Artificial Sequence: Synthetic epitope
PAQTSRRPSQ

SEQ ID NO: 31862 - protein, 10 aa, Artificial Sequence
  Description of Artificial Sequence: Synthetic epitope
PAQVAMVTEE

SEQ ID NO: 31863 - protein, 10 aa, Artificial Sequence
  Description of Artificial Sequence: Synthetic epitope
PARDEKKVGA

SEQ ID NO: 31864 - protein, 10 aa, Artificial Sequence
  Description of Artificial Sequence: Synthetic epitope
PAREVSSESG

SEQ ID NO: 31865 - protein, 10 aa, Artificial Sequence
  Description of Artificial Sequence: Synthetic epitope
PARKLTATPT

SEQ ID NO: 31866 - protein, 10 aa, Artificial Sequence
  Description of Artificial Sequence: Synthetic epitope
PARKRWAPVV

SEQ ID NO: 31867 - protein, 10 aa, Artificial Sequence
  Description of Artificial Sequence: Synthetic epitope
PARKVTLTRG

SEQ ID NO: 31868 - protein, 10 aa, Artificial Sequence
  Description of Artificial Sequence: Synthetic epitope
PARLRWDHFN

SEQ ID NO: 31869 - protein, 10 aa, Artificial Sequence
  Description of Artificial Sequence: Synthetic epitope
PARLVADQKT

SEQ ID NO: 31870 - protein, 10 aa, Artificial Sequence
  Description of Artificial Sequence: Synthetic epitope
PARMSNVVEP

SEQ ID NO: 31871 - protein, 10 aa, Artificial Sequence
  Description of Artificial Sequence: Synthetic epitope
PARQESSRTS

SEQ ID NO: 31872 - protein, 10 aa, Artificial Sequence
  Description of Artificial Sequence: Synthetic epitope
PARRNSRLDV

SEQ ID NO: 31873 - protein, 10 aa, Artificial Sequence
  Description of Artificial Sequence: Synthetic epitope
PARRQPDVEQ

SEQ ID NO: 31874 - protein, 10 aa, Artificial Sequence
  Description of Artificial Sequence: Synthetic epitope
PARRTEKSPS

SEQ ID NO: 31875 - protein, 10 aa, Artificial Sequence
  Description of Artificial Sequence: Synthetic epitope
PARSSLFQEK

SEQ ID NO: 31876 - protein, 10 aa, Artificial Sequence
  Description of Artificial Sequence: Synthetic epitope
PARSVSEKIN

SEQ ID NO: 31877 - protein, 10 aa, Artificial Sequence
  Description of Artificial Sequence: Synthetic epitope
PARVKSESRS

SEQ ID NO: 31878 - protein, 10 aa, Artificial Sequence
  Description of Artificial Sequence: Synthetic epitope
PASAGRVDHM

SEQ ID NO: 31879 - protein, 10 aa, Artificial Sequence
  Description of Artificial Sequence: Synthetic epitope
PASAHKEDAH

SEQ ID NO: 31880 - protein, 10 aa, Artificial Sequence
  Description of Artificial Sequence: Synthetic epitope
PASAKVLSLK

SEQ ID NO: 31881 - protein, 10 aa, Artificial Sequence
  Description of Artificial Sequence: Synthetic epitope
PASAQASGKT

SEQ ID NO: 31882 - protein, 10 aa, Artificial Sequence
  Description of Artificial Sequence: Synthetic epitope
PASASVSALI

SEQ ID NO: 31883 - protein, 10 aa, Artificial Sequence
  Description of Artificial Sequence: Synthetic epitope
PASDAQLNSQ

SEQ ID NO: 31884 - protein, 10 aa, Artificial Sequence
  Description of Artificial Sequence: Synthetic epitope
PASDLMLKNS

SEQ ID NO: 31885 - protein, 10 aa, Artificial Sequence
  Description of Artificial Sequence: Synthetic epitope
PASDSFRSDV

SEQ ID NO: 31886 - protein, 10 aa, Artificial Sequence
  Description of Artificial Sequence: Synthetic epitope
PASEKTLPIQ

SEQ ID NO: 31887 - protein, 10 aa, Artificial Sequence
  Description of Artificial Sequence: Synthetic epitope
PASEREQATS

SEQ ID NO: 31888 - protein, 10 aa, Artificial Sequence
  Description of Artificial Sequence: Synthetic epitope
PASGVSKKVE

SEQ ID NO: 31889 - protein, 10 aa, Artificial Sequence
  Description of Artificial Sequence: Synthetic epitope
PASITAAKTS

SEQ ID NO: 31890 - protein, 10 aa, Artificial Sequence
  Description of Artificial Sequence: Synthetic epitope
PASITGSVSD

SEQ ID NO: 31891 - protein, 10 aa, Artificial Sequence
  Description of Artificial Sequence: Synthetic epitope
PASKFSSASK

SEQ ID NO: 31892 - protein, 10 aa, Artificial Sequence
  Description of Artificial Sequence: Synthetic epitope
PASKKQRVAP

SEQ ID NO: 31893 - protein, 10 aa, Artificial Sequence
  Description of Artificial Sequence: Synthetic epitope
PASKTTLHKT

SEQ ID NO: 31894 - protein, 10 aa, Artificial Sequence
  Description of Artificial Sequence: Synthetic epitope
PASLAVSAKD

SEQ ID NO: 31895 - protein, 10 aa, Artificial Sequence
  Description of Artificial Sequence: Synthetic epitope
PASLKTVATI

SEQ ID NO: 31896 - protein, 10 aa, Artificial Sequence
  Description of Artificial Sequence: Synthetic epitope
PASLNKTSLK

SEQ ID NO: 31897 - protein, 10 aa, Artificial Sequence
  Description of Artificial Sequence: Synthetic epitope
PASLSANNTP

SEQ ID NO: 31898 - protein, 10 aa, Artificial Sequence
  Description of Artificial Sequence: Synthetic epitope
PASLTTRDPE

SEQ ID NO: 31899 - protein, 10 aa, Artificial Sequence
  Description of Artificial Sequence: Synthetic epitope
PASMAVMEGD

SEQ ID NO: 31900 - protein, 10 aa, Artificial Sequence
  Description of Artificial Sequence: Synthetic epitope
PASMNTVSTQ

SEQ ID NO: 31901 - protein, 10 aa, Artificial Sequence
  Description of Artificial Sequence: Synthetic epitope
PASMRTSTSE

SEQ ID NO: 31902 - protein, 10 aa, Artificial Sequence
  Description of Artificial Sequence: Synthetic epitope
PASSARNKRS

SEQ ID NO: 31903 - protein, 10 aa, Artificial Sequence
  Description of Artificial Sequence: Synthetic epitope
PASSESSLDI

SEQ ID NO: 31904 - protein, 10 aa, Artificial Sequence
  Description of Artificial Sequence: Synthetic epitope
PASSQSKHGM

SEQ ID NO: 31905 - protein, 10 aa, Artificial Sequence
  Description of Artificial Sequence: Synthetic epitope
PASSTVSTTE

SEQ ID NO: 31906 - protein, 10 aa, Artificial Sequence
  Description of Artificial Sequence: Synthetic epitope
PASTAASMVI

SEQ ID NO: 31907 - protein, 10 aa, Artificial Sequence
  Description of Artificial Sequence: Synthetic epitope
PASTATESTT

SEQ ID NO: 31908 - protein, 10 aa, Artificial Sequence
  Description of Artificial Sequence: Synthetic epitope
PASTQQIKAG

SEQ ID NO: 31909 - protein, 10 aa, Artificial Sequence
  Description of Artificial Sequence: Synthetic epitope
PASTSQAQLS

SEQ ID NO: 31910 - protein, 10 aa, Artificial Sequence
  Description of Artificial Sequence: Synthetic epitope
PASVALRKQE

SEQ ID NO: 31911 - protein, 10 aa, Artificial Sequence
  Description of Artificial Sequence: Synthetic epitope
PASVTILASA

SEQ ID NO: 31912 - protein, 10 aa, Artificial Sequence
  Description of Artificial Sequence: Synthetic epitope
PATAATATSP

SEQ ID NO: 31913 - protein, 10 aa, Artificial Sequence
  Description of Artificial Sequence: Synthetic epitope
PATAQLAGHS

SEQ ID NO: 31914 - protein, 10 aa, Artificial Sequence
  Description of Artificial Sequence: Synthetic epitope
PATATTASAS

SEQ ID NO: 31915 - protein, 10 aa, Artificial Sequence
  Description of Artificial Sequence: Synthetic epitope
PATEEMVAQS

SEQ ID NO: 31916 - protein, 10 aa, Artificial Sequence
  Description of Artificial Sequence: Synthetic epitope
PATEKLTTAQ

SEQ ID NO: 31917 - protein, 10 aa, Artificial Sequence
  Description of Artificial Sequence: Synthetic epitope
PATFNKNTPK

SEQ ID NO: 31918 - protein, 10 aa, Artificial Sequence
  Description of Artificial Sequence: Synthetic epitope
PATHNIQDEI

SEQ ID NO: 31919 - protein, 10 aa, Artificial Sequence
  Description of Artificial Sequence: Synthetic epitope
PATKEDSRFL

SEQ ID NO: 31920 - protein, 10 aa, Artificial Sequence
  Description of Artificial Sequence: Synthetic epitope
PATKESKDIL

SEQ ID NO: 31921 - protein, 10 aa, Artificial Sequence
  Description of Artificial Sequence: Synthetic epitope
PATKLSTLTR

SEQ ID NO: 31922 - protein, 10 aa, Artificial Sequence
  Description of Artificial Sequence: Synthetic epitope
PATKLVKLKD

SEQ ID NO: 31923 - protein, 10 aa, Artificial Sequence
  Description of Artificial Sequence: Synthetic epitope
PATKSNIKRT

SEQ ID NO: 31924 - protein, 10 aa, Artificial Sequence
  Description of Artificial Sequence: Synthetic epitope
PATLALESKE

SEQ ID NO: 31925 - protein, 10 aa, Artificial Sequence
  Description of Artificial Sequence: Synthetic epitope
PATLETQEQD

SEQ ID NO: 31926 - protein, 10 aa, Artificial Sequence
  Description of Artificial Sequence: Synthetic epitope
PATLSIALHK

SEQ ID NO: 31927 - protein, 10 aa, Artificial Sequence
  Description of Artificial Sequence: Synthetic epitope
PATPAEVANT

SEQ ID NO: 31928 - protein, 10 aa, Artificial Sequence
  Description of Artificial Sequence: Synthetic epitope
PATRNRESEA

SEQ ID NO: 31929 - protein, 10 aa, Artificial Sequence
  Description of Artificial Sequence: Synthetic epitope
PATRNVLRQL

SEQ ID NO: 31930 - protein, 10 aa, Artificial Sequence
  Description of Artificial Sequence: Synthetic epitope
PATRTQQSNI

SEQ ID NO: 31931 - protein, 10 aa, Artificial Sequence
  Description of Artificial Sequence: Synthetic epitope
PATRTTKGAR

SEQ ID NO: 31932 - protein, 10 aa, Artificial Sequence
  Description of Artificial Sequence: Synthetic epitope
PATRVTRRST

SEQ ID NO: 31933 - protein, 10 aa, Artificial Sequence
  Description of Artificial Sequence: Synthetic epitope
PATSETSNSR

SEQ ID NO: 31934 - protein, 10 aa, Artificial Sequence
  Description of Artificial Sequence: Synthetic epitope
PATSIITGVA

SEQ ID NO: 31935 - protein, 10 aa, Artificial Sequence
  Description of Artificial Sequence: Synthetic epitope
PATTGSVLAP

SEQ ID NO: 31936 - protein, 10 aa, Artificial Sequence
  Description of Artificial Sequence: Synthetic epitope
PATTSTTPVL

SEQ ID NO: 31937 - protein, 10 aa, Artificial Sequence
  Description of Artificial Sequence: Synthetic epitope
PATVELSSAP

SEQ ID NO: 31938 - protein, 10 aa, Artificial Sequence
  Description of Artificial Sequence: Synthetic epitope
PATVMAKPAV

SEQ ID NO: 31939 - protein, 10 aa, Artificial Sequence
  Description of Artificial Sequence: Synthetic epitope
PATYEISQEK

SEQ ID NO: 31940 - protein, 10 aa, Artificial Sequence
  Description of Artificial Sequence: Synthetic epitope
PAVANERVLE

SEQ ID NO: 31941 - protein, 10 aa, Artificial Sequence
  Description of Artificial Sequence: Synthetic epitope
PAVAQAEVPA

SEQ ID NO: 31942 - protein, 10 aa, Artificial Sequence
  Description of Artificial Sequence: Synthetic epitope
PAVDTQMETR

SEQ ID NO: 31943 - protein, 10 aa, Artificial Sequence
  Description of Artificial Sequence: Synthetic epitope
PAVENKQQIG

SEQ ID NO: 31944 - protein, 10 aa, Artificial Sequence
  Description of Artificial Sequence: Synthetic epitope
PAVGVMKELV

SEQ ID NO: 31945 - protein, 10 aa, Artificial Sequence
  Description of Artificial Sequence: Synthetic epitope
PAVHVGEPVH

SEQ ID NO: 31946 - protein, 10 aa, Artificial Sequence
  Description of Artificial Sequence: Synthetic epitope
PAVKKLKVLS

SEQ ID NO: 31947 - protein, 10 aa, Artificial Sequence
  Description of Artificial Sequence: Synthetic epitope
PAVKNVISYG

SEQ ID NO: 31948 - protein, 10 aa, Artificial Sequence
  Description of Artificial Sequence: Synthetic epitope
PAVLDKADGQ

SEQ ID NO: 31949 - protein, 10 aa, Artificial Sequence
  Description of Artificial Sequence: Synthetic epitope
PAVLDSLESP

SEQ ID NO: 31950 - protein, 10 aa, Artificial Sequence
  Description of Artificial Sequence: Synthetic epitope
PAVLGEVDTS

SEQ ID NO: 31951 - protein, 10 aa, Artificial Sequence
  Description of Artificial Sequence: Synthetic epitope
PAVLQRIQLQ

SEQ ID NO: 31952 - protein, 10 aa, Artificial Sequence
  Description of Artificial Sequence: Synthetic epitope
PAVLRVEAEY

SEQ ID NO: 31953 - protein, 10 aa, Artificial Sequence
  Description of Artificial Sequence: Synthetic epitope
PAVPTVQRGI

SEQ ID NO: 31954 - protein, 10 aa, Artificial Sequence
  Description of Artificial Sequence: Synthetic epitope
PAVQKVSQAS

SEQ ID NO: 31955 - protein, 10 aa, Artificial Sequence
  Description of Artificial Sequence: Synthetic epitope
PAVQTKTKKT

SEQ ID NO: 31956 - protein, 10 aa, Artificial Sequence
  Description of Artificial Sequence: Synthetic epitope
PAVRLKTPTK

SEQ ID NO: 31957 - protein, 10 aa, Artificial Sequence
  Description of Artificial Sequence: Synthetic epitope
PAVRVDFYNA

SEQ ID NO: 31958 - protein, 10 aa, Artificial Sequence
  Description of Artificial Sequence: Synthetic epitope
PAVSELSIEK

SEQ ID NO: 31959 - protein, 10 aa, Artificial Sequence
  Description of Artificial Sequence: Synthetic epitope
PAVSKASSRR

SEQ ID NO: 31960 - protein, 10 aa, Artificial Sequence
  Description of Artificial Sequence: Synthetic epitope
PAVSTTKIPP

SEQ ID NO: 31961 - protein, 10 aa, Artificial Sequence
  Description of Artificial Sequence: Synthetic epitope
PAVTEATPLK

SEQ ID NO: 31962 - protein, 10 aa, Artificial Sequence
  Description of Artificial Sequence: Synthetic epitope
PAVTRSTIQR

SEQ ID NO: 31963 - protein, 10 aa, Artificial Sequence
  Description of Artificial Sequence: Synthetic epitope
PAVTSLESAA

SEQ ID NO: 31964 - protein, 10 aa, Artificial Sequence
  Description of Artificial Sequence: Synthetic epitope
PAVVKASQEI

SEQ ID NO: 31965 - protein, 10 aa, Artificial Sequence
  Description of Artificial Sequence: Synthetic epitope
PAVVLASSRG

SEQ ID NO: 31966 - protein, 10 aa, Artificial Sequence
  Description of Artificial Sequence: Synthetic epitope
PAVVLTSYRS

SEQ ID NO: 31967 - protein, 10 aa, Artificial Sequence
  Description of Artificial Sequence: Synthetic epitope
PAVVTSLALH

SEQ ID NO: 31968 - protein, 10 aa, Artificial Sequence
  Description of Artificial Sequence: Synthetic epitope
PAWGTESTTV

SEQ ID NO: 31969 - protein, 10 aa, Artificial Sequence
  Description of Artificial Sequence: Synthetic epitope
PAYGRFIQER

SEQ ID NO: 31970 - protein, 10 aa, Artificial Sequence
  Description of Artificial Sequence: Synthetic epitope
PAYQRAKKAN

SEQ ID NO: 31971 - protein, 10 aa, Artificial Sequence
  Description of Artificial Sequence: Synthetic epitope
PAYSDEDYEE

SEQ ID NO: 31972 - protein, 10 aa, Artificial Sequence
  Description of Artificial Sequence: Synthetic epitope
PAYSLNTTKD

SEQ ID NO: 31973 - protein, 10 aa, Artificial Sequence
  Description of Artificial Sequence: Synthetic epitope
PAYSVQAVGA

SEQ ID NO: 31974 - protein, 10 aa, Artificial Sequence
  Description of Artificial Sequence: Synthetic epitope
PDAALKVDVK

SEQ ID NO: 31975 - protein, 10 aa, Artificial Sequence
  Description of Artificial Sequence: Synthetic epitope
PDAATQNRRF

SEQ ID NO: 31976 - protein, 10 aa, Artificial Sequence
  Description of Artificial Sequence: Synthetic epitope
PDAEEANSPD

SEQ ID NO: 31977 - protein, 10 aa, Artificial Sequence
  Description of Artificial Sequence: Synthetic epitope
PDAESSLDEA

SEQ ID NO: 31978 - protein, 10 aa, Artificial Sequence
  Description of Artificial Sequence: Synthetic epitope
PDAIIRTKDS

SEQ ID NO: 31979 - protein, 10 aa, Artificial Sequence
  Description of Artificial Sequence: Synthetic epitope
PDAKLKTENK

SEQ ID NO: 31980 - protein, 10 aa, Artificial Sequence
  Description of Artificial Sequence: Synthetic epitope
PDAKLTTESE

SEQ ID NO: 31981 - protein, 10 aa, Artificial Sequence
  Description of Artificial Sequence: Synthetic epitope
PDALEMLSLE

SEQ ID NO: 31982 - protein, 10 aa, Artificial Sequence
  Description of Artificial Sequence: Synthetic epitope
PDASATATDA

SEQ ID NO: 31983 - protein, 10 aa, Artificial Sequence
  Description of Artificial Sequence: Synthetic epitope
PDASVKFSEF

SEQ ID NO: 31984 - protein, 10 aa, Artificial Sequence
  Description of Artificial Sequence: Synthetic epitope
PDATEILHVK

SEQ ID NO: 31985 - protein, 10 aa, Artificial Sequence
  Description of Artificial Sequence: Synthetic epitope
PDATLSNLID

SEQ ID NO: 31986 - protein, 10 aa, Artificial Sequence
  Description of Artificial Sequence: Synthetic epitope
PDATSSHRTV

SEQ ID NO: 31987 - protein, 10 aa, Artificial Sequence
  Description of Artificial Sequence: Synthetic epitope
PDATVSTEVR

SEQ ID NO: 31988 - protein, 10 aa, Artificial Sequence
  Description of Artificial Sequence: Synthetic epitope
PDATYGTGSA

SEQ ID NO: 31989 - protein, 10 aa, Artificial Sequence
  Description of Artificial Sequence: Synthetic epitope
PDAVKAKLIS

SEQ ID NO: 31990 - protein, 10 aa, Artificial Sequence
  Description of Artificial Sequence: Synthetic epitope
PDDHAISDLS

SEQ ID NO: 31991 - protein, 10 aa, Artificial Sequence
  Description of Artificial Sequence: Synthetic epitope
PDDLEISEFP

SEQ ID NO: 31992 - protein, 10 aa, Artificial Sequence
  Description of Artificial Sequence: Synthetic epitope
PDDSTLSESA

SEQ ID NO: 31993 - protein, 10 aa, Artificial Sequence
  Description of Artificial Sequence: Synthetic epitope
PDEAESAEAG

SEQ ID NO: 31994 - protein, 10 aa, Artificial Sequence
  Description of Artificial Sequence: Synthetic epitope
PDEATAADQE

SEQ ID NO: 31995 - protein, 10 aa, Artificial Sequence
  Description of Artificial Sequence: Synthetic epitope
PDEAVGKVAR

SEQ ID NO: 31996 - protein, 10 aa, Artificial Sequence
  Description of Artificial Sequence: Synthetic epitope
PDEETPLAVQ

SEQ ID NO: 31997 - protein, 10 aa, Artificial Sequence
  Description of Artificial Sequence: Synthetic epitope
PDEIKQSPDE

SEQ ID NO: 31998 - protein, 10 aa, Artificial Sequence
  Description of Artificial Sequence: Synthetic epitope
PDEISEKSPE

SEQ ID NO: 31999 - protein, 10 aa, Artificial Sequence
  Description of Artificial Sequence: Synthetic epitope
PDEKDLMTQL

SEQ ID NO: 32000 - protein, 10 aa, Artificial Sequence
  Description of Artificial Sequence: Synthetic epitope
PDEKLGEAAV

SEQ ID NO: 32001 - protein, 10 aa, Artificial Sequence
  Description of Artificial Sequence: Synthetic epitope
PDEKVELFSK

SEQ ID NO: 32002 - protein, 10 aa, Artificial Sequence
  Description of Artificial Sequence: Synthetic epitope
PDELTNVAVK

SEQ ID NO: 32003 - protein, 10 aa, Artificial Sequence
  Description of Artificial Sequence: Synthetic epitope
PDEQIVGISR

SEQ ID NO: 32004 - protein, 10 aa, Artificial Sequence
  Description of Artificial Sequence: Synthetic epitope
PDESVSVQKD

SEQ ID NO: 32005 - protein, 10 aa, Artificial Sequence
  Description of Artificial Sequence: Synthetic epitope
PDFNSAELLA

SEQ ID NO: 32006 - protein, 10 aa, Artificial Sequence
  Description of Artificial Sequence: Synthetic epitope
PDFQLSASFS

SEQ ID NO: 32007 - protein, 10 aa, Artificial Sequence
  Description of Artificial Sequence: Synthetic epitope
PDFYKTKIKL

SEQ ID NO: 32008 - protein, 10 aa, Artificial Sequence
  Description of Artificial Sequence: Synthetic epitope
PDGASRSSLE

SEQ ID NO: 32009 - protein, 10 aa, Artificial Sequence
  Description of Artificial Sequence: Synthetic epitope
PDGHRVKKEV

SEQ ID NO: 32010 - protein, 10 aa, Artificial Sequence
  Description of Artificial Sequence: Synthetic epitope
PDGLVATYIS

SEQ ID NO: 32011 - protein, 10 aa, Artificial Sequence
  Description of Artificial Sequence: Synthetic epitope
PDGSQSKRSV

SEQ ID NO: 32012 - protein, 10 aa, Artificial Sequence
  Description of Artificial Sequence: Synthetic epitope
PDHMGVQQVL

SEQ ID NO: 32013 - protein, 10 aa, Artificial Sequence
  Description of Artificial Sequence: Synthetic epitope
PDHTRSRRSH

SEQ ID NO: 32014 - protein, 10 aa, Artificial Sequence
  Description of Artificial Sequence: Synthetic epitope
PDIAAEAQAL

SEQ ID NO: 32015 - protein, 10 aa, Artificial Sequence
  Description of Artificial Sequence: Synthetic epitope
PDIAAEYRHP

SEQ ID NO: 32016 - protein, 10 aa, Artificial Sequence
  Description of Artificial Sequence: Synthetic epitope
PDILAKSPQS

SEQ ID NO: 32017 - protein, 10 aa, Artificial Sequence
  Description of Artificial Sequence: Synthetic epitope
PDINLTQIST

SEQ ID NO: 32018 - protein, 10 aa, Artificial Sequence
  Description of Artificial Sequence: Synthetic epitope
PDISEIEEAT

SEQ ID NO: 32019 - protein, 10 aa, Artificial Sequence
  Description of Artificial Sequence: Synthetic epitope
PDKETSLVDA

SEQ ID NO: 32020 - protein, 10 aa, Artificial Sequence
  Description of Artificial Sequence: Synthetic epitope
PDKKSKKQQD

SEQ ID NO: 32021 - protein, 10 aa, Artificial Sequence
  Description of Artificial Sequence: Synthetic epitope
PDKLARLDPR

SEQ ID NO: 32022 - protein, 10 aa, Artificial Sequence
  Description of Artificial Sequence: Synthetic epitope
PDKLWSDDNE

SEQ ID NO: 32023 - protein, 10 aa, Artificial Sequence
  Description of Artificial Sequence: Synthetic epitope
PDKRLKAEPA

SEQ ID NO: 32024 - protein, 10 aa, Artificial Sequence
  Description of Artificial Sequence: Synthetic epitope
PDKSETASAT

SEQ ID NO: 32025 - protein, 10 aa, Artificial Sequence
  Description of Artificial Sequence: Synthetic epitope
PDKTASGLNK

SEQ ID NO: 32026 - protein, 10 aa, Artificial Sequence
  Description of Artificial Sequence: Synthetic epitope
PDKTMMDGSF

SEQ ID NO: 32027 - protein, 10 aa, Artificial Sequence
  Description of Artificial Sequence: Synthetic epitope
PDLAAPLDEN

SEQ ID NO: 32028 - protein, 10 aa, Artificial Sequence
  Description of Artificial Sequence: Synthetic epitope
PDLDSEALLA

SEQ ID NO: 32029 - protein, 10 aa, Artificial Sequence
  Description of Artificial Sequence: Synthetic epitope
PDLEILKKPI

SEQ ID NO: 32030 - protein, 10 aa, Artificial Sequence
  Description of Artificial Sequence: Synthetic epitope
PDLELKSQEV

SEQ ID NO: 32031 - protein, 10 aa, Artificial Sequence
  Description of Artificial Sequence: Synthetic epitope
PDLFEKRTNR

SEQ ID NO: 32032 - protein, 10 aa, Artificial Sequence
  Description of Artificial Sequence: Synthetic epitope
PDLGMEATDK

SEQ ID NO: 32033 - protein, 10 aa, Artificial Sequence
  Description of Artificial Sequence: Synthetic epitope
PDLKAMNPLK

SEQ ID NO: 32034 - protein, 10 aa, Artificial Sequence
  Description of Artificial Sequence: Synthetic epitope
PDLKSVQSLA

SEQ ID NO: 32035 - protein, 10 aa, Artificial Sequence
  Description of Artificial Sequence: Synthetic epitope
PDLLAAMQSL

SEQ ID NO: 32036 - protein, 10 aa, Artificial Sequence
  Description of Artificial Sequence: Synthetic epitope
PDLSKADING

SEQ ID NO: 32037 - protein, 10 aa, Artificial Sequence
  Description of Artificial Sequence: Synthetic epitope
PDLTKRRKEE

SEQ ID NO: 32038 - protein, 10 aa, Artificial Sequence
  Description of Artificial Sequence: Synthetic epitope
PDMMATLAKS

SEQ ID NO: 32039 - protein, 10 aa, Artificial Sequence
  Description of Artificial Sequence: Synthetic epitope
PDMPRTTNES

SEQ ID NO: 32040 - protein, 10 aa, Artificial Sequence
  Description of Artificial Sequence: Synthetic epitope
PDMTHSEVEK

SEQ ID NO: 32041 - protein, 10 aa, Artificial Sequence
  Description of Artificial Sequence: Synthetic epitope
PDNKVAEQED

SEQ ID NO: 32042 - protein, 10 aa, Artificial Sequence
  Description of Artificial Sequence: Synthetic epitope
PDNLSMADPN

SEQ ID NO: 32043 - protein, 10 aa, Artificial Sequence
  Description of Artificial Sequence: Synthetic epitope
PDNQQLKNEQ

SEQ ID NO: 32044 - protein, 10 aa, Artificial Sequence
  Description of Artificial Sequence: Synthetic epitope
PDNSQLEYTQ

SEQ ID NO: 32045 - protein, 10 aa, Artificial Sequence
  Description of Artificial Sequence: Synthetic epitope
PDPKSQMEFE

SEQ ID NO: 32046 - protein, 10 aa, Artificial Sequence
  Description of Artificial Sequence: Synthetic epitope
PDPLKITKGK

SEQ ID NO: 32047 - protein, 10 aa, Artificial Sequence
  Description of Artificial Sequence: Synthetic epitope
PDPMEESTTS

SEQ ID NO: 32048 - protein, 10 aa, Artificial Sequence
  Description of Artificial Sequence: Synthetic epitope
PDPSIYAYDN

SEQ ID NO: 32049 - protein, 10 aa, Artificial Sequence
  Description of Artificial Sequence: Synthetic epitope
PDPSNTVNRI

SEQ ID NO: 32050 - protein, 10 aa, Artificial Sequence
  Description of Artificial Sequence: Synthetic epitope
PDPSRTLDSQ

SEQ ID NO: 32051 - protein, 10 aa, Artificial Sequence
  Description of Artificial Sequence: Synthetic epitope
PDPSTASTSQ

SEQ ID NO: 32052 - protein, 10 aa, Artificial Sequence
  Description of Artificial Sequence: Synthetic epitope
PDQETTSLTS

SEQ ID NO: 32053 - protein, 10 aa, Artificial Sequence
  Description of Artificial Sequence: Synthetic epitope
PDQKLLSRRL

SEQ ID NO: 32054 - protein, 10 aa, Artificial Sequence
  Description of Artificial Sequence: Synthetic epitope
PDQNSKQLNA

SEQ ID NO: 32055 - protein, 10 aa, Artificial Sequence
  Description of Artificial Sequence: Synthetic epitope
PDQTVTNGQD

SEQ ID NO: 32056 - protein, 10 aa, Artificial Sequence
  Description of Artificial Sequence: Synthetic epitope
PDQVFRMFPD

SEQ ID NO: 32057 - protein, 10 aa, Artificial Sequence
  Description of Artificial Sequence: Synthetic epitope
PDRKKLAAKL

SEQ ID NO: 32058 - protein, 10 aa, Artificial Sequence
  Description of Artificial Sequence: Synthetic epitope
PDRKSTKAPS

SEQ ID NO: 32059 - protein, 10 aa, Artificial Sequence
  Description of Artificial Sequence: Synthetic epitope
PDRLRIRVNK

SEQ ID NO: 32060 - protein, 10 aa, Artificial Sequence
  Description of Artificial Sequence: Synthetic epitope
PDRPQAQQLQ

SEQ ID NO: 32061 - protein, 10 aa, Artificial Sequence
  Description of Artificial Sequence: Synthetic epitope
PDRQAGATTA

SEQ ID NO: 32062 - protein, 10 aa, Artificial Sequence
  Description of Artificial Sequence: Synthetic epitope
PDRRSVRESE

SEQ ID NO: 32063 - protein, 10 aa, Artificial Sequence
  Description of Artificial Sequence: Synthetic epitope
PDRSRAARDR

SEQ ID NO: 32064 - protein, 10 aa, Artificial Sequence
  Description of Artificial Sequence: Synthetic epitope
PDSEASQSPQ

SEQ ID NO: 32065 - protein, 10 aa, Artificial Sequence
  Description of Artificial Sequence: Synthetic epitope
PDSFTVLSEN

SEQ ID NO: 32066 - protein, 10 aa, Artificial Sequence
  Description of Artificial Sequence: Synthetic epitope
PDSGTSSAAD

SEQ ID NO: 32067 - protein, 10 aa, Artificial Sequence
  Description of Artificial Sequence: Synthetic epitope
PDSHQLAKAL

SEQ ID NO: 32068 - protein, 10 aa, Artificial Sequence
  Description of Artificial Sequence: Synthetic epitope
PDSKKSDYLY

SEQ ID NO: 32069 - protein, 10 aa, Artificial Sequence
  Description of Artificial Sequence: Synthetic epitope
PDSLAVSLGE

SEQ ID NO: 32070 - protein, 10 aa, Artificial Sequence
  Description of Artificial Sequence: Synthetic epitope
PDSLAVSLGE

SEQ ID NO: 32071 - protein, 10 aa, Artificial Sequence
  Description of Artificial Sequence: Synthetic epitope
PDSLAVSLGE

SEQ ID NO: 32072 - protein, 10 aa, Artificial Sequence
  Description of Artificial Sequence: Synthetic epitope
PDSLAVSLGE

SEQ ID NO: 32073 - protein, 10 aa, Artificial Sequence
  Description of Artificial Sequence: Synthetic epitope
PDSLESQLLD

SEQ ID NO: 32074 - protein, 10 aa, Artificial Sequence
  Description of Artificial Sequence: Synthetic epitope
PDSNKQRKGP

SEQ ID NO: 32075 - protein, 10 aa, Artificial Sequence
  Description of Artificial Sequence: Synthetic epitope
PDSRSVKVSQ

SEQ ID NO: 32076 - protein, 10 aa, Artificial Sequence
  Description of Artificial Sequence: Synthetic epitope
PDSSKLLSGV

SEQ ID NO: 32077 - protein, 10 aa, Artificial Sequence
  Description of Artificial Sequence: Synthetic epitope
PDSTIQKQNF

SEQ ID NO: 32078 - protein, 10 aa, Artificial Sequence
  Description of Artificial Sequence: Synthetic epitope
PDTAQLLMPQ

SEQ ID NO: 32079 - protein, 10 aa, Artificial Sequence
  Description of Artificial Sequence: Synthetic epitope
PDTKKIALEK

SEQ ID NO: 32080 - protein, 10 aa, Artificial Sequence
  Description of Artificial Sequence: Synthetic epitope
PDTRNVVRAS

SEQ ID NO: 32081 - protein, 10 aa, Artificial Sequence
  Description of Artificial Sequence: Synthetic epitope
PDTRTREASE

SEQ ID NO: 32082 - protein, 10 aa, Artificial Sequence
  Description of Artificial Sequence: Synthetic epitope
PDTTAASSAD

SEQ ID NO: 32083 - protein, 10 aa, Artificial Sequence
  Description of Artificial Sequence: Synthetic epitope
PDVEDSSQRP

SEQ ID NO: 32084 - protein, 10 aa, Artificial Sequence
  Description of Artificial Sequence: Synthetic epitope
PDVEQPQTQP

SEQ ID NO: 32085 - protein, 10 aa, Artificial Sequence
  Description of Artificial Sequence: Synthetic epitope
PDVKVARTLP

SEQ ID NO: 32086 - protein, 10 aa, Artificial Sequence
  Description of Artificial Sequence: Synthetic epitope
PDVLTSKPST

SEQ ID NO: 32087 - protein, 10 aa, Artificial Sequence
  Description of Artificial Sequence: Synthetic epitope
PDVSVQSVAD

SEQ ID NO: 32088 - protein, 10 aa, Artificial Sequence
  Description of Artificial Sequence: Synthetic epitope
PDVTSKILNK

SEQ ID NO: 32089 - protein, 10 aa, Artificial Sequence
  Description of Artificial Sequence: Synthetic epitope
PDVTSTQVNT

SEQ ID NO: 32090 - protein, 10 aa, Artificial Sequence
  Description of Artificial Sequence: Synthetic epitope
PDWLTWPADM

SEQ ID NO: 32091 - protein, 10 aa, Artificial Sequence
  Description of Artificial Sequence: Synthetic epitope
PDWRFMESKE

SEQ ID NO: 32092 - protein, 10 aa, Artificial Sequence
  Description of Artificial Sequence: Synthetic epitope
PDYDSAASEY

SEQ ID NO: 32093 - protein, 10 aa, Artificial Sequence
  Description of Artificial Sequence: Synthetic epitope
PDYIKSTVET

SEQ ID NO: 32094 - protein, 10 aa, Artificial Sequence
  Description of Artificial Sequence: Synthetic epitope
PDYSLAAVDL

SEQ ID NO: 32095 - protein, 10 aa, Artificial Sequence
  Description of Artificial Sequence: Synthetic epitope
PDYSMALSYS

SEQ ID NO: 32096 - protein, 10 aa, Artificial Sequence
  Description of Artificial Sequence: Synthetic epitope
PDYVKVQDIE

SEQ ID NO: 32097 - protein, 10 aa, Artificial Sequence
  Description of Artificial Sequence: Synthetic epitope
PEAAESKTAA

SEQ ID NO: 32098 - protein, 10 aa, Artificial Sequence
  Description of Artificial Sequence: Synthetic epitope
PEAAKQSATN

SEQ ID NO: 32099 - protein, 10 aa, Artificial Sequence
  Description of Artificial Sequence: Synthetic epitope
PEAASSALAL

SEQ ID NO: 32100 - protein, 10 aa, Artificial Sequence
  Description of Artificial Sequence: Synthetic epitope
PEAEASTLDV

SEQ ID NO: 32101 - protein, 10 aa, Artificial Sequence
  Description of Artificial Sequence: Synthetic epitope
PEAEGIQFVE

SEQ ID NO: 32102 - protein, 10 aa, Artificial Sequence
  Description of Artificial Sequence: Synthetic epitope
PEAEKSQIEH

SEQ ID NO: 32103 - protein, 10 aa, Artificial Sequence
  Description of Artificial Sequence: Synthetic epitope
PEAENKSRKK

SEQ ID NO: 32104 - protein, 10 aa, Artificial Sequence
  Description of Artificial Sequence: Synthetic epitope
PEAEQQLTSN

SEQ ID NO: 32105 - protein, 10 aa, Artificial Sequence
  Description of Artificial Sequence: Synthetic epitope
PEAETPIRSP

SEQ ID NO: 32106 - protein, 10 aa, Artificial Sequence
  Description of Artificial Sequence: Synthetic epitope
PEAGEMTSEN

SEQ ID NO: 32107 - protein, 10 aa, Artificial Sequence
  Description of Artificial Sequence: Synthetic epitope
PEAIAAIQSK

SEQ ID NO: 32108 - protein, 10 aa, Artificial Sequence
  Description of Artificial Sequence: Synthetic epitope
PEAKATKLEK

SEQ ID NO: 32109 - protein, 10 aa, Artificial Sequence
  Description of Artificial Sequence: Synthetic epitope
PEALLQFQQP

SEQ ID NO: 32110 - protein, 10 aa, Artificial Sequence
  Description of Artificial Sequence: Synthetic epitope
PEAMKAATEE

SEQ ID NO: 32111 - protein, 10 aa, Artificial Sequence
  Description of Artificial Sequence: Synthetic epitope
PEANSETFKE

SEQ ID NO: 32112 - protein, 10 aa, Artificial Sequence
  Description of Artificial Sequence: Synthetic epitope
PEARTSEDSL

SEQ ID NO: 32113 - protein, 10 aa, Artificial Sequence
  Description of Artificial Sequence: Synthetic epitope
PEASSLQSKN

SEQ ID NO: 32114 - protein, 10 aa, Artificial Sequence
  Description of Artificial Sequence: Synthetic epitope
PEATKTISAS

SEQ ID NO: 32115 - protein, 10 aa, Artificial Sequence
  Description of Artificial Sequence: Synthetic epitope
PEAVGGAQNE

SEQ ID NO: 32116 - protein, 10 aa, Artificial Sequence
  Description of Artificial Sequence: Synthetic epitope
PEDAARAADE

SEQ ID NO: 32117 - protein, 10 aa, Artificial Sequence
  Description of Artificial Sequence: Synthetic epitope
PEDAKSTGQA

SEQ ID NO: 32118 - protein, 10 aa, Artificial Sequence
  Description of Artificial Sequence: Synthetic epitope
PEDASESEEK

SEQ ID NO: 32119 - protein, 10 aa, Artificial Sequence
  Description of Artificial Sequence: Synthetic epitope
PEDDNISNDS

SEQ ID NO: 32120 - protein, 10 aa, Artificial Sequence
  Description of Artificial Sequence: Synthetic epitope
PEDEAAKRAL

SEQ ID NO: 32121 - protein, 10 aa, Artificial Sequence
  Description of Artificial Sequence: Synthetic epitope
PEDEKKEPPE

SEQ ID NO: 32122 - protein, 10 aa, Artificial Sequence
  Description of Artificial Sequence: Synthetic epitope
PEDESQVDQD

SEQ ID NO: 32123 - protein, 10 aa, Artificial Sequence
  Description of Artificial Sequence: Synthetic epitope
PEDIKKMTKD

SEQ ID NO: 32124 - protein, 10 aa, Artificial Sequence
  Description of Artificial Sequence: Synthetic epitope
PEDTQSLSLS

SEQ ID NO: 32125 - protein, 10 aa, Artificial Sequence
  Description of Artificial Sequence: Synthetic epitope
PEEASAQEGE

SEQ ID NO: 32126 - protein, 10 aa, Artificial Sequence
  Description of Artificial Sequence: Synthetic epitope
PEEDQILKKP

SEQ ID NO: 32127 - protein, 10 aa, Artificial Sequence
  Description of Artificial Sequence: Synthetic epitope
PEEIESMTAS

SEQ ID NO: 32128 - protein, 10 aa, Artificial Sequence
  Description of Artificial Sequence: Synthetic epitope
PEEKKIEYRL

SEQ ID NO: 32129 - protein, 10 aa, Artificial Sequence
  Description of Artificial Sequence: Synthetic epitope
PEEKVAGKRE

SEQ ID NO: 32130 - protein, 10 aa, Artificial Sequence
  Description of Artificial Sequence: Synthetic epitope
PEEMHVKNGW

SEQ ID NO: 32131 - protein, 10 aa, Artificial Sequence
  Description of Artificial Sequence: Synthetic epitope
PEENEYKSEG

SEQ ID NO: 32132 - protein, 10 aa, Artificial Sequence
  Description of Artificial Sequence: Synthetic epitope
PEEQKSVIEI

SEQ ID NO: 32133 - protein, 10 aa, Artificial Sequence
  Description of Artificial Sequence: Synthetic epitope
PEERESTEAT

SEQ ID NO: 32134 - protein, 10 aa, Artificial Sequence
  Description of Artificial Sequence: Synthetic epitope
PEERKGKESE

SEQ ID NO: 32135 - protein, 10 aa, Artificial Sequence
  Description of Artificial Sequence: Synthetic epitope
PEERTIEYLE

SEQ ID NO: 32136 - protein, 10 aa, Artificial Sequence
  Description of Artificial Sequence: Synthetic epitope
PEESIPKPVH

SEQ ID NO: 32137 - protein, 10 aa, Artificial Sequence
  Description of Artificial Sequence: Synthetic epitope
PEESQTTSKE

SEQ ID NO: 32138 - protein, 10 aa, Artificial Sequence
  Description of Artificial Sequence: Synthetic epitope
PEESSASGET

SEQ ID NO: 32139 - protein, 10 aa, Artificial Sequence
  Description of Artificial Sequence: Synthetic epitope
PEESSQSRDS

SEQ ID NO: 32140 - protein, 10 aa, Artificial Sequence
  Description of Artificial Sequence: Synthetic epitope
PEETRSTENG

SEQ ID NO: 32141 - protein, 10 aa, Artificial Sequence
  Description of Artificial Sequence: Synthetic epitope
PEEVEGESLA

SEQ ID NO: 32142 - protein, 10 aa, Artificial Sequence
  Description of Artificial Sequence: Synthetic epitope
PEEVLQLAAQ

SEQ ID NO: 32143 - protein, 10 aa, Artificial Sequence
  Description of Artificial Sequence: Synthetic epitope
PEEVSEARRE

SEQ ID NO: 32144 - protein, 10 aa, Artificial Sequence
  Description of Artificial Sequence: Synthetic epitope
PEFAALTKEL

SEQ ID NO: 32145 - protein, 10 aa, Artificial Sequence
  Description of Artificial Sequence: Synthetic epitope
PEFADMITVQ

SEQ ID NO: 32146 - protein, 10 aa, Artificial Sequence
  Description of Artificial Sequence: Synthetic epitope
PEFISTFIKK

SEQ ID NO: 32147 - protein, 10 aa, Artificial Sequence
  Description of Artificial Sequence: Synthetic epitope
PEFITEFSKL

SEQ ID NO: 32148 - protein, 10 aa, Artificial Sequence
  Description of Artificial Sequence: Synthetic epitope
PEFSHHVEFT

SEQ ID NO: 32149 - protein, 10 aa, Artificial Sequence
  Description of Artificial Sequence: Synthetic epitope
PEFSKSFSSR

SEQ ID NO: 32150 - protein, 10 aa, Artificial Sequence
  Description of Artificial Sequence: Synthetic epitope
PEFSNQFESI

SEQ ID NO: 32151 - protein, 10 aa, Artificial Sequence
  Description of Artificial Sequence: Synthetic epitope
PEFVRVRSYE

SEQ ID NO: 32152 - protein, 10 aa, Artificial Sequence
  Description of Artificial Sequence: Synthetic epitope
PEGAKAKQNE

SEQ ID NO: 32153 - protein, 10 aa, Artificial Sequence
  Description of Artificial Sequence: Synthetic epitope
PEGASVSSAG

SEQ ID NO: 32154 - protein, 10 aa, Artificial Sequence
  Description of Artificial Sequence: Synthetic epitope
PEGEETLESD

SEQ ID NO: 32155 - protein, 10 aa, Artificial Sequence
  Description of Artificial Sequence: Synthetic epitope
PEGEWTTGNM

SEQ ID NO: 32156 - protein, 10 aa, Artificial Sequence
  Description of Artificial Sequence: Synthetic epitope
PEGIKAMVEA

SEQ ID NO: 32157 - protein, 10 aa, Artificial Sequence
  Description of Artificial Sequence: Synthetic epitope
PEGVADLTQI

SEQ ID NO: 32158 - protein, 10 aa, Artificial Sequence
  Description of Artificial Sequence: Synthetic epitope
PEGVVARRKR

SEQ ID NO: 32159 - protein, 10 aa, Artificial Sequence
  Description of Artificial Sequence: Synthetic epitope
PEHAFYEFTF

SEQ ID NO: 32160 - protein, 10 aa, Artificial Sequence
  Description of Artificial Sequence: Synthetic epitope
PEHISNIISL

SEQ ID NO: 32161 - protein, 10 aa, Artificial Sequence
  Description of Artificial Sequence: Synthetic epitope
PEHKEAEGSS

SEQ ID NO: 32162 - protein, 10 aa, Artificial Sequence
  Description of Artificial Sequence: Synthetic epitope
PEHSASSDST

SEQ ID NO: 32163 - protein, 10 aa, Artificial Sequence
  Description of Artificial Sequence: Synthetic epitope
PEHVVKVVGG

SEQ ID NO: 32164 - protein, 10 aa, Artificial Sequence
  Description of Artificial Sequence: Synthetic epitope
PEIAQATSSR

SEQ ID NO: 32165 - protein, 10 aa, Artificial Sequence
  Description of Artificial Sequence: Synthetic epitope
PEIATSELVQ

SEQ ID NO: 32166 - protein, 10 aa, Artificial Sequence
  Description of Artificial Sequence: Synthetic epitope
PEIAYAYKVS

SEQ ID NO: 32167 - protein, 10 aa, Artificial Sequence
  Description of Artificial Sequence: Synthetic epitope
PEIDNATKKP

SEQ ID NO: 32168 - protein, 10 aa, Artificial Sequence
  Description of Artificial Sequence: Synthetic epitope
PEIIESLKKN

SEQ ID NO: 32169 - protein, 10 aa, Artificial Sequence
  Description of Artificial Sequence: Synthetic epitope
PEIKKSTTSQ

SEQ ID NO: 32170 - protein, 10 aa, Artificial Sequence
  Description of Artificial Sequence: Synthetic epitope
PEIQELRQWQ

SEQ ID NO: 32171 - protein, 10 aa, Artificial Sequence
  Description of Artificial Sequence: Synthetic epitope
PEIQKFSSRI

SEQ ID NO: 32172 - protein, 10 aa, Artificial Sequence
  Description of Artificial Sequence: Synthetic epitope
PEIRLKEQIL

SEQ ID NO: 32173 - protein, 10 aa, Artificial Sequence
  Description of Artificial Sequence: Synthetic epitope
PEIVATASKV

SEQ ID NO: 32174 - protein, 10 aa, Artificial Sequence
  Description of Artificial Sequence: Synthetic epitope
PEIVGEKKGT

SEQ ID NO: 32175 - protein, 10 aa, Artificial Sequence
  Description of Artificial Sequence: Synthetic epitope
PEKAAVLDTG

SEQ ID NO: 32176 - protein, 10 aa, Artificial Sequence
  Description of Artificial Sequence: Synthetic epitope
PEKASSADTS

SEQ ID NO: 32177 - protein, 10 aa, Artificial Sequence
  Description of Artificial Sequence: Synthetic epitope
PEKDHSSKSA

SEQ ID NO: 32178 - protein, 10 aa, Artificial Sequence
  Description of Artificial Sequence: Synthetic epitope
PEKDNALASD

SEQ ID NO: 32179 - protein, 10 aa, Artificial Sequence
  Description of Artificial Sequence: Synthetic epitope
PEKDRKVKID

SEQ ID NO: 32180 - protein, 10 aa, Artificial Sequence
  Description of Artificial Sequence: Synthetic epitope
PEKEETSQAD

SEQ ID NO: 32181 - protein, 10 aa, Artificial Sequence
  Description of Artificial Sequence: Synthetic epitope
PEKEQSKHKR

SEQ ID NO: 32182 - protein, 10 aa, Artificial Sequence
  Description of Artificial Sequence: Synthetic epitope
PEKIASELKD

SEQ ID NO: 32183 - protein, 10 aa, Artificial Sequence
  Description of Artificial Sequence: Synthetic epitope
PEKIKQEALE

SEQ ID NO: 32184 - protein, 10 aa, Artificial Sequence
  Description of Artificial Sequence: Synthetic epitope
PEKKASEVGR

SEQ ID NO: 32185 - protein, 10 aa, Artificial Sequence
  Description of Artificial Sequence: Synthetic epitope
PEKKLVYQEI

SEQ ID NO: 32186 - protein, 10 aa, Artificial Sequence
  Description of Artificial Sequence: Synthetic epitope
PEKLKLEESL

SEQ ID NO: 32187 - protein, 10 aa, Artificial Sequence
  Description of Artificial Sequence: Synthetic epitope
PEKLSASTRR

SEQ ID NO: 32188 - protein, 10 aa, Artificial Sequence
  Description of Artificial Sequence: Synthetic epitope
PEKLVIKNQQ

SEQ ID NO: 32189 - protein, 10 aa, Artificial Sequence
  Description of Artificial Sequence: Synthetic epitope
PEKNTKAEPK

SEQ ID NO: 32190 - protein, 10 aa, Artificial Sequence
  Description of Artificial Sequence: Synthetic epitope
PEKRKRNSVD

SEQ ID NO: 32191 - protein, 10 aa, Artificial Sequence
  Description of Artificial Sequence: Synthetic epitope
PEKSLVSDKT

SEQ ID NO: 32192 - protein, 10 aa, Artificial Sequence
  Description of Artificial Sequence: Synthetic epitope
PEKSVEGQNF

SEQ ID NO: 32193 - protein, 10 aa, Artificial Sequence
  Description of Artificial Sequence: Synthetic epitope
PEKVKQAENT

SEQ ID NO: 32194 - protein, 10 aa, Artificial Sequence
  Description of Artificial Sequence: Synthetic epitope
PEKVYTNDIL

SEQ ID NO: 32195 - protein, 10 aa, Artificial Sequence
  Description of Artificial Sequence: Synthetic epitope
PELAESSLPA

SEQ ID NO: 32196 - protein, 10 aa, Artificial Sequence
  Description of Artificial Sequence: Synthetic epitope
PELAKASGSP

SEQ ID NO: 32197 - protein, 10 aa, Artificial Sequence
  Description of Artificial Sequence: Synthetic epitope
PELASAIKQP

SEQ ID NO: 32198 - protein, 10 aa, Artificial Sequence
  Description of Artificial Sequence: Synthetic epitope
PELASEAEEV

SEQ ID NO: 32199 - protein, 10 aa, Artificial Sequence
  Description of Artificial Sequence: Synthetic epitope
PELASQATEG

SEQ ID NO: 32200 - protein, 10 aa, Artificial Sequence
  Description of Artificial Sequence: Synthetic epitope
PELASTLDAQ

SEQ ID NO: 32201 - protein, 10 aa, Artificial Sequence
  Description of Artificial Sequence: Synthetic epitope
PELEAEEKLS

SEQ ID NO: 32202 - protein, 10 aa, Artificial Sequence
  Description of Artificial Sequence: Synthetic epitope
PELFQLALKA

SEQ ID NO: 32203 - protein, 10 aa, Artificial Sequence
  Description of Artificial Sequence: Synthetic epitope
PELGKLADSS

SEQ ID NO: 32204 - protein, 10 aa, Artificial Sequence
  Description of Artificial Sequence: Synthetic epitope
PELGMSFQVQ

SEQ ID NO: 32205 - protein, 10 aa, Artificial Sequence
  Description of Artificial Sequence: Synthetic epitope
PELIAAEKKY

SEQ ID NO: 32206 - protein, 10 aa, Artificial Sequence
  Description of Artificial Sequence: Synthetic epitope
PELLDSGRIE

SEQ ID NO: 32207 - protein, 10 aa, Artificial Sequence
  Description of Artificial Sequence: Synthetic epitope
PELLKSTLPP

SEQ ID NO: 32208 - protein, 10 aa, Artificial Sequence
  Description of Artificial Sequence: Synthetic epitope
PELNSINMSR

SEQ ID NO: 32209 - protein, 10 aa, Artificial Sequence
  Description of Artificial Sequence: Synthetic epitope
PELQAVIKEG

SEQ ID NO: 32210 - protein, 10 aa, Artificial Sequence
  Description of Artificial Sequence: Synthetic epitope
PELRLSLTKG

SEQ ID NO: 32211 - protein, 10 aa, Artificial Sequence
  Description of Artificial Sequence: Synthetic epitope
PELSVLAQQN

SEQ ID NO: 32212 - protein, 10 aa, Artificial Sequence
  Description of Artificial Sequence: Synthetic epitope
PELVSELVLR

SEQ ID NO: 32213 - protein, 10 aa, Artificial Sequence
  Description of Artificial Sequence: Synthetic epitope
PEMAAKLHPH

SEQ ID NO: 32214 - protein, 10 aa, Artificial Sequence
  Description of Artificial Sequence: Synthetic epitope
PEMFIKKEEL

SEQ ID NO: 32215 - protein, 10 aa, Artificial Sequence
  Description of Artificial Sequence: Synthetic epitope
PEMSQSKTEH

SEQ ID NO: 32216 - protein, 10 aa, Artificial Sequence
  Description of Artificial Sequence: Synthetic epitope
PEMVMVLKEV

SEQ ID NO: 32217 - protein, 10 aa, Artificial Sequence
  Description of Artificial Sequence: Synthetic epitope
PENAERQTPT

SEQ ID NO: 32218 - protein, 10 aa, Artificial Sequence
  Description of Artificial Sequence: Synthetic epitope
PENISHSEQL

SEQ ID NO: 32219 - protein, 10 aa, Artificial Sequence
  Description of Artificial Sequence: Synthetic epitope
PENITLSGEG

SEQ ID NO: 32220 - protein, 10 aa, Artificial Sequence
  Description of Artificial Sequence: Synthetic epitope
PENKESKEAE

SEQ ID NO: 32221 - protein, 10 aa, Artificial Sequence
  Description of Artificial Sequence: Synthetic epitope
PENKESKEAE

SEQ ID NO: 32222 - protein, 10 aa, Artificial Sequence
  Description of Artificial Sequence: Synthetic epitope
PENNALNTQT

SEQ ID NO: 32223 - protein, 10 aa, Artificial Sequence
  Description of Artificial Sequence: Synthetic epitope
PENNFSVQPT

SEQ ID NO: 32224 - protein, 10 aa, Artificial Sequence
  Description of Artificial Sequence: Synthetic epitope
PENSTSSQLM

SEQ ID NO: 32225 - protein, 10 aa, Artificial Sequence
  Description of Artificial Sequence: Synthetic epitope
PENTHAANSI

SEQ ID NO: 32226 - protein, 10 aa, Artificial Sequence
  Description of Artificial Sequence: Synthetic epitope
PEPAAVAGVE

SEQ ID NO: 32227 - protein, 10 aa, Artificial Sequence
  Description of Artificial Sequence: Synthetic epitope
PEPAKAIKPI

SEQ ID NO: 32228 - protein, 10 aa, Artificial Sequence
  Description of Artificial Sequence: Synthetic epitope
PEPAVSNTEE

SEQ ID NO: 32229 - protein, 10 aa, Artificial Sequence
  Description of Artificial Sequence: Synthetic epitope
PEPELSLDLE

SEQ ID NO: 32230 - protein, 10 aa, Artificial Sequence
  Description of Artificial Sequence: Synthetic epitope
PEPLVVKGKR

SEQ ID NO: 32231 - protein, 10 aa, Artificial Sequence
  Description of Artificial Sequence: Synthetic epitope
PEPRSESPSR

SEQ ID NO: 32232 - protein, 10 aa, Artificial Sequence
  Description of Artificial Sequence: Synthetic epitope
PEPSNEAAKP

SEQ ID NO: 32233 - protein, 10 aa, Artificial Sequence
  Description of Artificial Sequence: Synthetic epitope
PEPSVAEPPS

SEQ ID NO: 32234 - protein, 10 aa, Artificial Sequence
  Description of Artificial Sequence: Synthetic epitope
PEPTTDDVSP

SEQ ID NO: 32235 - protein, 10 aa, Artificial Sequence
  Description of Artificial Sequence: Synthetic epitope
PEPVFSIKLK

SEQ ID NO: 32236 - protein, 10 aa, Artificial Sequence
  Description of Artificial Sequence: Synthetic epitope
PEPVSAQIEE

SEQ ID NO: 32237 - protein, 10 aa, Artificial Sequence
  Description of Artificial Sequence: Synthetic epitope
PEQAKKSSDP

SEQ ID NO: 32238 - protein, 10 aa, Artificial Sequence
  Description of Artificial Sequence: Synthetic epitope
PEQKASNLIG

SEQ ID NO: 32239 - protein, 10 aa, Artificial Sequence
  Description of Artificial Sequence: Synthetic epitope
PEQLVSSAPT

SEQ ID NO: 32240 - protein, 10 aa, Artificial Sequence
  Description of Artificial Sequence: Synthetic epitope
PEQSAVTLDN

SEQ ID NO: 32241 - protein, 10 aa, Artificial Sequence
  Description of Artificial Sequence: Synthetic epitope
PEQSKSKKYH

SEQ ID NO: 32242 - protein, 10 aa, Artificial Sequence
  Description of Artificial Sequence: Synthetic epitope
PEQTEVQIQE

SEQ ID NO: 32243 - protein, 10 aa, Artificial Sequence
  Description of Artificial Sequence: Synthetic epitope
PEQVQQVIIF

SEQ ID NO: 32244 - protein, 10 aa, Artificial Sequence
  Description of Artificial Sequence: Synthetic epitope
PEREAMKRKA

SEQ ID NO: 32245 - protein, 10 aa, Artificial Sequence
  Description of Artificial Sequence: Synthetic epitope
PERELVRALQ

SEQ ID NO: 32246 - protein, 10 aa, Artificial Sequence
  Description of Artificial Sequence: Synthetic epitope
PERETATDLD

SEQ ID NO: 32247 - protein, 10 aa, Artificial Sequence
  Description of Artificial Sequence: Synthetic epitope
PERKKSAVTY

SEQ ID NO: 32248 - protein, 10 aa, Artificial Sequence
  Description of Artificial Sequence: Synthetic epitope
PERKSMEVLS

SEQ ID NO: 32249 - protein, 10 aa, Artificial Sequence
  Description of Artificial Sequence: Synthetic epitope
PERKVVETED

SEQ ID NO: 32250 - protein, 10 aa, Artificial Sequence
  Description of Artificial Sequence: Synthetic epitope
PERLKTRVST

SEQ ID NO: 32251 - protein, 10 aa, Artificial Sequence
  Description of Artificial Sequence: Synthetic epitope
PERLLAELPA

SEQ ID NO: 32252 - protein, 10 aa, Artificial Sequence
  Description of Artificial Sequence: Synthetic epitope
PERPREKEEP

SEQ ID NO: 32253 - protein, 10 aa, Artificial Sequence
  Description of Artificial Sequence: Synthetic epitope
PERQTDVTGE

SEQ ID NO: 32254 - protein, 10 aa, Artificial Sequence
  Description of Artificial Sequence: Synthetic epitope
PERRQEDRAH

SEQ ID NO: 32255 - protein, 10 aa, Artificial Sequence
  Description of Artificial Sequence: Synthetic epitope
PERSKGLQVP

SEQ ID NO: 32256 - protein, 10 aa, Artificial Sequence
  Description of Artificial Sequence: Synthetic epitope
PERTKASGEA

SEQ ID NO: 32257 - protein, 10 aa, Artificial Sequence
  Description of Artificial Sequence: Synthetic epitope
PERTSAAMLS

SEQ ID NO: 32258 - protein, 10 aa, Artificial Sequence
  Description of Artificial Sequence: Synthetic epitope
PERVEEIPPE

SEQ ID NO: 32259 - protein, 10 aa, Artificial Sequence
  Description of Artificial Sequence: Synthetic epitope
PERYSYGTSS

SEQ ID NO: 32260 - protein, 10 aa, Artificial Sequence
  Description of Artificial Sequence: Synthetic epitope
PESAGAATTE

SEQ ID NO: 32261 - protein, 10 aa, Artificial Sequence
  Description of Artificial Sequence: Synthetic epitope
PESAGAATTE

SEQ ID NO: 32262 - protein, 10 aa, Artificial Sequence
  Description of Artificial Sequence: Synthetic epitope
PESALAQAQK

SEQ ID NO: 32263 - protein, 10 aa, Artificial Sequence
  Description of Artificial Sequence: Synthetic epitope
PESEAVLFSE

SEQ ID NO: 32264 - protein, 10 aa, Artificial Sequence
  Description of Artificial Sequence: Synthetic epitope
PESERKLQSS

SEQ ID NO: 32265 - protein, 10 aa, Artificial Sequence
  Description of Artificial Sequence: Synthetic epitope
PESFASSLDG

SEQ ID NO: 32266 - protein, 10 aa, Artificial Sequence
  Description of Artificial Sequence: Synthetic epitope
PESHSSADSA

SEQ ID NO: 32267 - protein, 10 aa, Artificial Sequence
  Description of Artificial Sequence: Synthetic epitope
PESKAALLKK

SEQ ID NO: 32268 - protein, 10 aa, Artificial Sequence
  Description of Artificial Sequence: Synthetic epitope
PESKQATTPA

SEQ ID NO: 32269 - protein, 10 aa, Artificial Sequence
  Description of Artificial Sequence: Synthetic epitope
PESLDSKRRS

SEQ ID NO: 32270 - protein, 10 aa, Artificial Sequence
  Description of Artificial Sequence: Synthetic epitope
PESLGESGSP

SEQ ID NO: 32271 - protein, 10 aa, Artificial Sequence
  Description of Artificial Sequence: Synthetic epitope
PESLSKVSII

SEQ ID NO: 32272 - protein, 10 aa, Artificial Sequence
  Description of Artificial Sequence: Synthetic epitope
PESNAVTKTA

SEQ ID NO: 32273 - protein, 10 aa, Artificial Sequence
  Description of Artificial Sequence: Synthetic epitope
PESNDKETEA

SEQ ID NO: 32274 - protein, 10 aa, Artificial Sequence
  Description of Artificial Sequence: Synthetic epitope
PESNINSDNE

SEQ ID NO: 32275 - protein, 10 aa, Artificial Sequence
  Description of Artificial Sequence: Synthetic epitope
PESNRSNIEV

SEQ ID NO: 32276 - protein, 10 aa, Artificial Sequence
  Description of Artificial Sequence: Synthetic epitope
PESNTNLTET

SEQ ID NO: 32277 - protein, 10 aa, Artificial Sequence
  Description of Artificial Sequence: Synthetic epitope
PESQKDRKAG

SEQ ID NO: 32278 - protein, 10 aa, Artificial Sequence
  Description of Artificial Sequence: Synthetic epitope
PESQLAKRWK

SEQ ID NO: 32279 - protein, 10 aa, Artificial Sequence
  Description of Artificial Sequence: Synthetic epitope
PESQLIQQSE

SEQ ID NO: 32280 - protein, 10 aa, Artificial Sequence
  Description of Artificial Sequence: Synthetic epitope
PESRDEEMSN

SEQ ID NO: 32281 - protein, 10 aa, Artificial Sequence
  Description of Artificial Sequence: Synthetic epitope
PESSAMAVLE

SEQ ID NO: 32282 - protein, 10 aa, Artificial Sequence
  Description of Artificial Sequence: Synthetic epitope
PESSEIPPSH

SEQ ID NO: 32283 - protein, 10 aa, Artificial Sequence
  Description of Artificial Sequence: Synthetic epitope
PESSEVREVQ

SEQ ID NO: 32284 - protein, 10 aa, Artificial Sequence
  Description of Artificial Sequence: Synthetic epitope
PESSGAVETV

SEQ ID NO: 32285 - protein, 10 aa, Artificial Sequence
  Description of Artificial Sequence: Synthetic epitope
PESSILMPES

SEQ ID NO: 32286 - protein, 10 aa, Artificial Sequence
  Description of Artificial Sequence: Synthetic epitope
PESSLTADLL

SEQ ID NO: 32287 - protein, 10 aa, Artificial Sequence
  Description of Artificial Sequence: Synthetic epitope
PESSRQEQLE

SEQ ID NO: 32288 - protein, 10 aa, Artificial Sequence
  Description of Artificial Sequence: Synthetic epitope
PESSTASNSV

SEQ ID NO: 32289 - protein, 10 aa, Artificial Sequence
  Description of Artificial Sequence: Synthetic epitope
PESVELTSKS

SEQ ID NO: 32290 - protein, 10 aa, Artificial Sequence
  Description of Artificial Sequence: Synthetic epitope
PESVSKSKSA

SEQ ID NO: 32291 - protein, 10 aa, Artificial Sequence
  Description of Artificial Sequence: Synthetic epitope
PETAQTEVAP

SEQ ID NO: 32292 - protein, 10 aa, Artificial Sequence
  Description of Artificial Sequence: Synthetic epitope
PETAVSQSRI

SEQ ID NO: 32293 - protein, 10 aa, Artificial Sequence
  Description of Artificial Sequence: Synthetic epitope
PETGARKVRV

SEQ ID NO: 32294 - protein, 10 aa, Artificial Sequence
  Description of Artificial Sequence: Synthetic epitope
PETKTMGKVS

SEQ ID NO: 32295 - protein, 10 aa, Artificial Sequence
  Description of Artificial Sequence: Synthetic epitope
PETKVENIGV

SEQ ID NO: 32296 - protein, 10 aa, Artificial Sequence
  Description of Artificial Sequence: Synthetic epitope
PETLSIMDDL

SEQ ID NO: 32297 - protein, 10 aa, Artificial Sequence
  Description of Artificial Sequence: Synthetic epitope
PETLVEAKEE

SEQ ID NO: 32298 - protein, 10 aa, Artificial Sequence
  Description of Artificial Sequence: Synthetic epitope
PETMTKSKDG

SEQ ID NO: 32299 - protein, 10 aa, Artificial Sequence
  Description of Artificial Sequence: Synthetic epitope
PETNKNITRG

SEQ ID NO: 32300 - protein, 10 aa, Artificial Sequence
  Description of Artificial Sequence: Synthetic epitope
PETNYLGNTP

SEQ ID NO: 32301 - protein, 10 aa, Artificial Sequence
  Description of Artificial Sequence: Synthetic epitope
PETQKTDTRH

SEQ ID NO: 32302 - protein, 10 aa, Artificial Sequence
  Description of Artificial Sequence: Synthetic epitope
PETQPQSETK

SEQ ID NO: 32303 - protein, 10 aa, Artificial Sequence
  Description of Artificial Sequence: Synthetic epitope
PETQVEKEQI

SEQ ID NO: 32304 - protein, 10 aa, Artificial Sequence
  Description of Artificial Sequence: Synthetic epitope
PETRLSSEAQ

SEQ ID NO: 32305 - protein, 10 aa, Artificial Sequence
  Description of Artificial Sequence: Synthetic epitope
PETSLKSSPV

SEQ ID NO: 32306 - protein, 10 aa, Artificial Sequence
  Description of Artificial Sequence: Synthetic epitope
PETSMLLDQV

SEQ ID NO: 32307 - protein, 10 aa, Artificial Sequence
  Description of Artificial Sequence: Synthetic epitope
PETSRSSDAF

SEQ ID NO: 32308 - protein, 10 aa, Artificial Sequence
  Description of Artificial Sequence: Synthetic epitope
PETSSLASNL

SEQ ID NO: 32309 - protein, 10 aa, Artificial Sequence
  Description of Artificial Sequence: Synthetic epitope
PETSSTSLST

SEQ ID NO: 32310 - protein, 10 aa, Artificial Sequence
  Description of Artificial Sequence: Synthetic epitope
PETSVSSTVS

SEQ ID NO: 32311 - protein, 10 aa, Artificial Sequence
  Description of Artificial Sequence: Synthetic epitope
PETTEVLVSP

SEQ ID NO: 32312 - protein, 10 aa, Artificial Sequence
  Description of Artificial Sequence: Synthetic epitope
PETTKAEPEV

SEQ ID NO: 32313 - protein, 10 aa, Artificial Sequence
  Description of Artificial Sequence: Synthetic epitope
PETTVVTGRA

SEQ ID NO: 32314 - protein, 10 aa, Artificial Sequence
  Description of Artificial Sequence: Synthetic epitope
PETVEKETSS

SEQ ID NO: 32315 - protein, 10 aa, Artificial Sequence
  Description of Artificial Sequence: Synthetic epitope
PETVLKNQEV

SEQ ID NO: 32316 - protein, 10 aa, Artificial Sequence
  Description of Artificial Sequence: Synthetic epitope
PETVVSRSSI

SEQ ID NO: 32317 - protein, 10 aa, Artificial Sequence
  Description of Artificial Sequence: Synthetic epitope
PEVAKLAVKY

SEQ ID NO: 32318 - protein, 10 aa, Artificial Sequence
  Description of Artificial Sequence: Synthetic epitope
PEVASLAMDS

SEQ ID NO: 32319 - protein, 10 aa, Artificial Sequence
  Description of Artificial Sequence: Synthetic epitope
PEVDAKLLKR

SEQ ID NO: 32320 - protein, 10 aa, Artificial Sequence
  Description of Artificial Sequence: Synthetic epitope
PEVDDSSAQK

SEQ ID NO: 32321 - protein, 10 aa, Artificial Sequence
  Description of Artificial Sequence: Synthetic epitope
PEVETIVQEE

SEQ ID NO: 32322 - protein, 10 aa, Artificial Sequence
  Description of Artificial Sequence: Synthetic epitope
PEVFTVEEMM

SEQ ID NO: 32323 - protein, 10 aa, Artificial Sequence
  Description of Artificial Sequence: Synthetic epitope
PEVGAKGQLK

SEQ ID NO: 32324 - protein, 10 aa, Artificial Sequence
  Description of Artificial Sequence: Synthetic epitope
PEVIQQVSAP

SEQ ID NO: 32325 - protein, 10 aa, Artificial Sequence
  Description of Artificial Sequence: Synthetic epitope
PEVKIVELVK

SEQ ID NO: 32326 - protein, 10 aa, Artificial Sequence
  Description of Artificial Sequence: Synthetic epitope
PEVKNKLEAS

SEQ ID NO: 32327 - protein, 10 aa, Artificial Sequence
  Description of Artificial Sequence: Synthetic epitope
PEVKNLKSIE

SEQ ID NO: 32328 - protein, 10 aa, Artificial Sequence
  Description of Artificial Sequence: Synthetic epitope
PEVKSTSERF

SEQ ID NO: 32329 - protein, 10 aa, Artificial Sequence
  Description of Artificial Sequence: Synthetic epitope
PEVKTATQKP

SEQ ID NO: 32330 - protein, 10 aa, Artificial Sequence
  Description of Artificial Sequence: Synthetic epitope
PEVKTLAVDQ

SEQ ID NO: 32331 - protein, 10 aa, Artificial Sequence
  Description of Artificial Sequence: Synthetic epitope
PEVKTTEKKE

SEQ ID NO: 32332 - protein, 10 aa, Artificial Sequence
  Description of Artificial Sequence: Synthetic epitope
PEVLSLAREL

SEQ ID NO: 32333 - protein, 10 aa, Artificial Sequence
  Description of Artificial Sequence: Synthetic epitope
PEVNEAITGT

SEQ ID NO: 32334 - protein, 10 aa, Artificial Sequence
  Description of Artificial Sequence: Synthetic epitope
PEVNITAPVT

SEQ ID NO: 32335 - protein, 10 aa, Artificial Sequence
  Description of Artificial Sequence: Synthetic epitope
PEVQSSISPP

SEQ ID NO: 32336 - protein, 10 aa, Artificial Sequence
  Description of Artificial Sequence: Synthetic epitope
PEVRMANADA

SEQ ID NO: 32337 - protein, 10 aa, Artificial Sequence
  Description of Artificial Sequence: Synthetic epitope
PEVRTRAAEA

SEQ ID NO: 32338 - protein, 10 aa, Artificial Sequence
  Description of Artificial Sequence: Synthetic epitope
PEVSSAKRRP

SEQ ID NO: 32339 - protein, 10 aa, Artificial Sequence
  Description of Artificial Sequence: Synthetic epitope
PEVSSLSIHG

SEQ ID NO: 32340 - protein, 10 aa, Artificial Sequence
  Description of Artificial Sequence: Synthetic epitope
PEVTSALLES

SEQ ID NO: 32341 - protein, 10 aa, Artificial Sequence
  Description of Artificial Sequence: Synthetic epitope
PEVTSIVATV

SEQ ID NO: 32342 - protein, 10 aa, Artificial Sequence
  Description of Artificial Sequence: Synthetic epitope
PEVWVQVRME

SEQ ID NO: 32343 - protein, 10 aa, Artificial Sequence
  Description of Artificial Sequence: Synthetic epitope
PEVYVADGHW

SEQ ID NO: 32344 - protein, 10 aa, Artificial Sequence
  Description of Artificial Sequence: Synthetic epitope
PEWFDVKPTV

SEQ ID NO: 32345 - protein, 10 aa, Artificial Sequence
  Description of Artificial Sequence: Synthetic epitope
PEWSKKQKMK

SEQ ID NO: 32346 - protein, 10 aa, Artificial Sequence
  Description of Artificial Sequence: Synthetic epitope
PEYKVSDAKK

SEQ ID NO: 32347 - protein, 10 aa, Artificial Sequence
  Description of Artificial Sequence: Synthetic epitope
PEYLQALPEM

SEQ ID NO: 32348 - protein, 10 aa, Artificial Sequence
  Description of Artificial Sequence: Synthetic epitope
PEYNAKELVD

SEQ ID NO: 32349 - protein, 10 aa, Artificial Sequence
  Description of Artificial Sequence: Synthetic epitope
PEYNYDWWEK

SEQ ID NO: 32350 - protein, 10 aa, Artificial Sequence
  Description of Artificial Sequence: Synthetic epitope
PEYSAEYSAE

SEQ ID NO: 32351 - protein, 10 aa, Artificial Sequence
  Description of Artificial Sequence: Synthetic epitope
PEYSASQLKG

SEQ ID NO: 32352 - protein, 10 aa, Artificial Sequence
  Description of Artificial Sequence: Synthetic epitope
PEYVHPNKAK

SEQ ID NO: 32353 - protein, 10 aa, Artificial Sequence
  Description of Artificial Sequence: Synthetic epitope
PFAFEAMQKV

SEQ ID NO: 32354 - protein, 10 aa, Artificial Sequence
  Description of Artificial Sequence: Synthetic epitope
PFAISRVSTR

SEQ ID NO: 32355 - protein, 10 aa, Artificial Sequence
  Description of Artificial Sequence: Synthetic epitope
PFANRMQKSP

SEQ ID NO: 32356 - protein, 10 aa, Artificial Sequence
  Description of Artificial Sequence: Synthetic epitope
PFAQRTSQNL

SEQ ID NO: 32357 - protein, 10 aa, Artificial Sequence
  Description of Artificial Sequence: Synthetic epitope
PFASEILLET

SEQ ID NO: 32358 - protein, 10 aa, Artificial Sequence
  Description of Artificial Sequence: Synthetic epitope
PFATQVGVIR

SEQ ID NO: 32359 - protein, 10 aa, Artificial Sequence
  Description of Artificial Sequence: Synthetic epitope
PFDGMITETK

SEQ ID NO: 32360 - protein, 10 aa, Artificial Sequence
  Description of Artificial Sequence: Synthetic epitope
PFEDFRISQE

SEQ ID NO: 32361 - protein, 10 aa, Artificial Sequence
  Description of Artificial Sequence: Synthetic epitope
PFEDVAGTEM

SEQ ID NO: 32362 - protein, 10 aa, Artificial Sequence
  Description of Artificial Sequence: Synthetic epitope
PFEETEEKWL

SEQ ID NO: 32363 - protein, 10 aa, Artificial Sequence
  Description of Artificial Sequence: Synthetic epitope
PFERQRTKEM

SEQ ID NO: 32364 - protein, 10 aa, Artificial Sequence
  Description of Artificial Sequence: Synthetic epitope
PFGSTERKTP

SEQ ID NO: 32365 - protein, 10 aa, Artificial Sequence
  Description of Artificial Sequence: Synthetic epitope
PFGTDYRNLA

SEQ ID NO: 32366 - protein, 10 aa, Artificial Sequence
  Description of Artificial Sequence: Synthetic epitope
PFHEIVTKDM

SEQ ID NO: 32367 - protein, 10 aa, Artificial Sequence
  Description of Artificial Sequence: Synthetic epitope
PFINFMKTRG

SEQ ID NO: 32368 - protein, 10 aa, Artificial Sequence
  Description of Artificial Sequence: Synthetic epitope
PFIVPLSVII

SEQ ID NO: 32369 - protein, 10 aa, Artificial Sequence
  Description of Artificial Sequence: Synthetic epitope
PFKDEVAEST

SEQ ID NO: 32370 - protein, 10 aa, Artificial Sequence
  Description of Artificial Sequence: Synthetic epitope
PFKSALSTVS

SEQ ID NO: 32371 - protein, 10 aa, Artificial Sequence
  Description of Artificial Sequence: Synthetic epitope
PFLGAMGDHS

SEQ ID NO: 32372 - protein, 10 aa, Artificial Sequence
  Description of Artificial Sequence: Synthetic epitope
PFLLEKSMEP

SEQ ID NO: 32373 - protein, 10 aa, Artificial Sequence
  Description of Artificial Sequence: Synthetic epitope
PFLSKEEKKE

SEQ ID NO: 32374 - protein, 10 aa, Artificial Sequence
  Description of Artificial Sequence: Synthetic epitope
PFLSSPAVLS

SEQ ID NO: 32375 - protein, 10 aa, Artificial Sequence
  Description of Artificial Sequence: Synthetic epitope
PFLSVSSKPP

SEQ ID NO: 32376 - protein, 10 aa, Artificial Sequence
  Description of Artificial Sequence: Synthetic epitope
PFPMNRSSGT

SEQ ID NO: 32377 - protein, 10 aa, Artificial Sequence
  Description of Artificial Sequence: Synthetic epitope
PFPQEARAEI

SEQ ID NO: 32378 - protein, 10 aa, Artificial Sequence
  Description of Artificial Sequence: Synthetic epitope
PFQLSDQLQQ

SEQ ID NO: 32379 - protein, 10 aa, Artificial Sequence
  Description of Artificial Sequence: Synthetic epitope
PFRNSNLTEL

SEQ ID NO: 32380 - protein, 10 aa, Artificial Sequence
  Description of Artificial Sequence: Synthetic epitope
PFRQIQVLEP

SEQ ID NO: 32381 - protein, 10 aa, Artificial Sequence
  Description of Artificial Sequence: Synthetic epitope
PFSDEDASIE

SEQ ID NO: 32382 - protein, 10 aa, Artificial Sequence
  Description of Artificial Sequence: Synthetic epitope
PFSEFVPKVY

SEQ ID NO: 32383 - protein, 10 aa, Artificial Sequence
  Description of Artificial Sequence: Synthetic epitope
PFSFPQVTSS

SEQ ID NO: 32384 - protein, 10 aa, Artificial Sequence
  Description of Artificial Sequence: Synthetic epitope
PFSNNMASQQ

SEQ ID NO: 32385 - protein, 10 aa, Artificial Sequence
  Description of Artificial Sequence: Synthetic epitope
PFSPKASVAA

SEQ ID NO: 32386 - protein, 10 aa, Artificial Sequence
  Description of Artificial Sequence: Synthetic epitope
PFSQTITHEG

SEQ ID NO: 32387 - protein, 10 aa, Artificial Sequence
  Description of Artificial Sequence: Synthetic epitope
PFSSFASQAS

SEQ ID NO: 32388 - protein, 10 aa, Artificial Sequence
  Description of Artificial Sequence: Synthetic epitope
PFSSTLQNNP

SEQ ID NO: 32389 - protein, 10 aa, Artificial Sequence
  Description of Artificial Sequence: Synthetic epitope
PFSVAKSVKS

SEQ ID NO: 32390 - protein, 10 aa, Artificial Sequence
  Description of Artificial Sequence: Synthetic epitope
PFSVSAELDG

SEQ ID NO: 32391 - protein, 10 aa, Artificial Sequence
  Description of Artificial Sequence: Synthetic epitope
PFSWRVFQFR

SEQ ID NO: 32392 - protein, 10 aa, Artificial Sequence
  Description of Artificial Sequence: Synthetic epitope
PFTKAKRKKS

SEQ ID NO: 32393 - protein, 10 aa, Artificial Sequence
  Description of Artificial Sequence: Synthetic epitope
PFTLASTSID

SEQ ID NO: 32394 - protein, 10 aa, Artificial Sequence
  Description of Artificial Sequence: Synthetic epitope
PFTNKNQQKE

SEQ ID NO: 32395 - protein, 10 aa, Artificial Sequence
  Description of Artificial Sequence: Synthetic epitope
PFTQNAETTE

SEQ ID NO: 32396 - protein, 10 aa, Artificial Sequence
  Description of Artificial Sequence: Synthetic epitope
PFTQNAETTE

SEQ ID NO: 32397 - protein, 10 aa, Artificial Sequence
  Description of Artificial Sequence: Synthetic epitope
PFVARSLLEK

SEQ ID NO: 32398 - protein, 10 aa, Artificial Sequence
  Description of Artificial Sequence: Synthetic epitope
PFVDEQQPTE

SEQ ID NO: 32399 - protein, 10 aa, Artificial Sequence
  Description of Artificial Sequence: Synthetic epitope
PFVKMFITKM

SEQ ID NO: 32400 - protein, 10 aa, Artificial Sequence
  Description of Artificial Sequence: Synthetic epitope
PFVKPNRHSP

SEQ ID NO: 32401 - protein, 10 aa, Artificial Sequence
  Description of Artificial Sequence: Synthetic epitope
PFVKTRFAPQ

SEQ ID NO: 32402 - protein, 10 aa, Artificial Sequence
  Description of Artificial Sequence: Synthetic epitope
PFVKTTRLIP

SEQ ID NO: 32403 - protein, 10 aa, Artificial Sequence
  Description of Artificial Sequence: Synthetic epitope
PFVNFFEMSK

SEQ ID NO: 32404 - protein, 10 aa, Artificial Sequence
  Description of Artificial Sequence: Synthetic epitope
PFVPSTIFPV

SEQ ID NO: 32405 - protein, 10 aa, Artificial Sequence
  Description of Artificial Sequence: Synthetic epitope
PFVRERSDST

SEQ ID NO: 32406 - protein, 10 aa, Artificial Sequence
  Description of Artificial Sequence: Synthetic epitope
PFVRSVQRQS

SEQ ID NO: 32407 - protein, 10 aa, Artificial Sequence
  Description of Artificial Sequence: Synthetic epitope
PFVTVNAQWG

SEQ ID NO: 32408 - protein, 10 aa, Artificial Sequence
  Description of Artificial Sequence: Synthetic epitope
PFYPTSDTVE

SEQ ID NO: 32409 - protein, 10 aa, Artificial Sequence
  Description of Artificial Sequence: Synthetic epitope
PGAANASAQQ

SEQ ID NO: 32410 - protein, 10 aa, Artificial Sequence
  Description of Artificial Sequence: Synthetic epitope
PGAHISVNFS

SEQ ID NO: 32411 - protein, 10 aa, Artificial Sequence
  Description of Artificial Sequence: Synthetic epitope
PGAHKEVGGA

SEQ ID NO: 32412 - protein, 10 aa, Artificial Sequence
  Description of Artificial Sequence: Synthetic epitope
PGAKAVVPQP

SEQ ID NO: 32413 - protein, 10 aa, Artificial Sequence
  Description of Artificial Sequence: Synthetic epitope
PGAKLKALEE

SEQ ID NO: 32414 - protein, 10 aa, Artificial Sequence
  Description of Artificial Sequence: Synthetic epitope
PGAKTSSRND

SEQ ID NO: 32415 - protein, 10 aa, Artificial Sequence
  Description of Artificial Sequence: Synthetic epitope
PGAMAGMQYP

SEQ ID NO: 32416 - protein, 10 aa, Artificial Sequence
  Description of Artificial Sequence: Synthetic epitope
PGAMSSESST

SEQ ID NO: 32417 - protein, 10 aa, Artificial Sequence
  Description of Artificial Sequence: Synthetic epitope
PGARGAATAM

SEQ ID NO: 32418 - protein, 10 aa, Artificial Sequence
  Description of Artificial Sequence: Synthetic epitope
PGASATSSES

SEQ ID NO: 32419 - protein, 10 aa, Artificial Sequence
  Description of Artificial Sequence: Synthetic epitope
PGAVQASSPA

SEQ ID NO: 32420 - protein, 10 aa, Artificial Sequence
  Description of Artificial Sequence: Synthetic epitope
PGAVVKARPM

SEQ ID NO: 32421 - protein, 10 aa, Artificial Sequence
  Description of Artificial Sequence: Synthetic epitope
PGDFTSAAQL

SEQ ID NO: 32422 - protein, 10 aa, Artificial Sequence
  Description of Artificial Sequence: Synthetic epitope
PGDHKAQAHN

SEQ ID NO: 32423 - protein, 10 aa, Artificial Sequence
  Description of Artificial Sequence: Synthetic epitope
PGDSSKKRGP

SEQ ID NO: 32424 - protein, 10 aa, Artificial Sequence
  Description of Artificial Sequence: Synthetic epitope
PGDVLAKSSA

SEQ ID NO: 32425 - protein, 10 aa, Artificial Sequence
  Description of Artificial Sequence: Synthetic epitope
PGEAKFKSIN

SEQ ID NO: 32426 - protein, 10 aa, Artificial Sequence
  Description of Artificial Sequence: Synthetic epitope
PGEFVSEALL

SEQ ID NO: 32427 - protein, 10 aa, Artificial Sequence
  Description of Artificial Sequence: Synthetic epitope
PGEIVVNEVN

SEQ ID NO: 32428 - protein, 10 aa, Artificial Sequence
  Description of Artificial Sequence: Synthetic epitope
PGELVVEEAP

SEQ ID NO: 32429 - protein, 10 aa, Artificial Sequence
  Description of Artificial Sequence: Synthetic epitope
PGEMQLNTNY

SEQ ID NO: 32430 - protein, 10 aa, Artificial Sequence
  Description of Artificial Sequence: Synthetic epitope
PGESAQNEAT

SEQ ID NO: 32431 - protein, 10 aa, Artificial Sequence
  Description of Artificial Sequence: Synthetic epitope
PGESIQIFAE

SEQ ID NO: 32432 - protein, 10 aa, Artificial Sequence
  Description of Artificial Sequence: Synthetic epitope
PGESTQTSGN

SEQ ID NO: 32433 - protein, 10 aa, Artificial Sequence
  Description of Artificial Sequence: Synthetic epitope
PGETALIDRT

SEQ ID NO: 32434 - protein, 10 aa, Artificial Sequence
  Description of Artificial Sequence: Synthetic epitope
PGEVEASGVA

SEQ ID NO: 32435 - protein, 10 aa, Artificial Sequence
  Description of Artificial Sequence: Synthetic epitope
PGEVKSTQDR

SEQ ID NO: 32436 - protein, 10 aa, Artificial Sequence
  Description of Artificial Sequence: Synthetic epitope
PGEVQASAAS

SEQ ID NO: 32437 - protein, 10 aa, Artificial Sequence
  Description of Artificial Sequence: Synthetic epitope
PGEVVLSPKQ

SEQ ID NO: 32438 - protein, 10 aa, Artificial Sequence
  Description of Artificial Sequence: Synthetic epitope
PGFDASQLSS

SEQ ID NO: 32439 - protein, 10 aa, Artificial Sequence
  Description of Artificial Sequence: Synthetic epitope
PGFLKMYKKM

SEQ ID NO: 32440 - protein, 10 aa, Artificial Sequence
  Description of Artificial Sequence: Synthetic epitope
PGGKEVTSTE

SEQ ID NO: 32441 - protein, 10 aa, Artificial Sequence
  Description of Artificial Sequence: Synthetic epitope
PGGQAQVTES

SEQ ID NO: 32442 - protein, 10 aa, Artificial Sequence
  Description of Artificial Sequence: Synthetic epitope
PGGRATALLY

SEQ ID NO: 32443 - protein, 10 aa, Artificial Sequence
  Description of Artificial Sequence: Synthetic epitope
PGGTMKSLKK

SEQ ID NO: 32444 - protein, 10 aa, Artificial Sequence
  Description of Artificial Sequence: Synthetic epitope
PGHHAAIKPA

SEQ ID NO: 32445 - protein, 10 aa, Artificial Sequence
  Description of Artificial Sequence: Synthetic epitope
PGHKEATMEL

SEQ ID NO: 32446 - protein, 10 aa, Artificial Sequence
  Description of Artificial Sequence: Synthetic epitope
PGHTKAKQPY

SEQ ID NO: 32447 - protein, 10 aa, Artificial Sequence
  Description of Artificial Sequence: Synthetic epitope
PGIFASSQPG

SEQ ID NO: 32448 - protein, 10 aa, Artificial Sequence
  Description of Artificial Sequence: Synthetic epitope
PGITEREKRE

SEQ ID NO: 32449 - protein, 10 aa, Artificial Sequence
  Description of Artificial Sequence: Synthetic epitope
PGITLLNVSK

SEQ ID NO: 32450 - protein, 10 aa, Artificial Sequence
  Description of Artificial Sequence: Synthetic epitope
PGITNREAKK

SEQ ID NO: 32451 - protein, 10 aa, Artificial Sequence
  Description of Artificial Sequence: Synthetic epitope
PGKADGQQSS

SEQ ID NO: 32452 - protein, 10 aa, Artificial Sequence
  Description of Artificial Sequence: Synthetic epitope
PGKASVSRKQ

SEQ ID NO: 32453 - protein, 10 aa, Artificial Sequence
  Description of Artificial Sequence: Synthetic epitope
PGKEALAAFL

SEQ ID NO: 32454 - protein, 10 aa, Artificial Sequence
  Description of Artificial Sequence: Synthetic epitope
PGKENINDEP

SEQ ID NO: 32455 - protein, 10 aa, Artificial Sequence
  Description of Artificial Sequence: Synthetic epitope
PGKGGKAKGK

SEQ ID NO: 32456 - protein, 10 aa, Artificial Sequence
  Description of Artificial Sequence: Synthetic epitope
PGKKINKERL

SEQ ID NO: 32457 - protein, 10 aa, Artificial Sequence
  Description of Artificial Sequence: Synthetic epitope
PGKKREFNAF

SEQ ID NO: 32458 - protein, 10 aa, Artificial Sequence
  Description of Artificial Sequence: Synthetic epitope
PGKLKEAPAA

SEQ ID NO: 32459 - protein, 10 aa, Artificial Sequence
  Description of Artificial Sequence: Synthetic epitope
PGKSEGSSDL

SEQ ID NO: 32460 - protein, 10 aa, Artificial Sequence
  Description of Artificial Sequence: Synthetic epitope
PGKSRKAAGD

SEQ ID NO: 32461 - protein, 10 aa, Artificial Sequence
  Description of Artificial Sequence: Synthetic epitope
PGKTALATRE

SEQ ID NO: 32462 - protein, 10 aa, Artificial Sequence
  Description of Artificial Sequence: Synthetic epitope
PGKTNKATTY

SEQ ID NO: 32463 - protein, 10 aa, Artificial Sequence
  Description of Artificial Sequence: Synthetic epitope
PGLAESIDSD

SEQ ID NO: 32464 - protein, 10 aa, Artificial Sequence
  Description of Artificial Sequence: Synthetic epitope
PGLAQVITAV

SEQ ID NO: 32465 - protein, 10 aa, Artificial Sequence
  Description of Artificial Sequence: Synthetic epitope
PGLETAVVFQ

SEQ ID NO: 32466 - protein, 10 aa, Artificial Sequence
  Description of Artificial Sequence: Synthetic epitope
PGLETGQVGK

SEQ ID NO: 32467 - protein, 10 aa, Artificial Sequence
  Description of Artificial Sequence: Synthetic epitope
PGLIQDKEWN

SEQ ID NO: 32468 - protein, 10 aa, Artificial Sequence
  Description of Artificial Sequence: Synthetic epitope
PGLKASSAEK

SEQ ID NO: 32469 - protein, 10 aa, Artificial Sequence
  Description of Artificial Sequence: Synthetic epitope
PGLMVKAPSG

SEQ ID NO: 32470 - protein, 10 aa, Artificial Sequence
  Description of Artificial Sequence: Synthetic epitope
PGLNKNQSQS

SEQ ID NO: 32471 - protein, 10 aa, Artificial Sequence
  Description of Artificial Sequence: Synthetic epitope
PGLNVSVDKF

SEQ ID NO: 32472 - protein, 10 aa, Artificial Sequence
  Description of Artificial Sequence: Synthetic epitope
PGLSEATRGT

SEQ ID NO: 32473 - protein, 10 aa, Artificial Sequence
  Description of Artificial Sequence: Synthetic epitope
PGLSISLRLT

SEQ ID NO: 32474 - protein, 10 aa, Artificial Sequence
  Description of Artificial Sequence: Synthetic epitope
PGLTGSKMSS

SEQ ID NO: 32475 - protein, 10 aa, Artificial Sequence
  Description of Artificial Sequence: Synthetic epitope
PGLVDLASTS

SEQ ID NO: 32476 - protein, 10 aa, Artificial Sequence
  Description of Artificial Sequence: Synthetic epitope
PGMKTAAQAK

SEQ ID NO: 32477 - protein, 10 aa, Artificial Sequence
  Description of Artificial Sequence: Synthetic epitope
PGMSASTSGS

SEQ ID NO: 32478 - protein, 10 aa, Artificial Sequence
  Description of Artificial Sequence: Synthetic epitope
PGMTLQLKLK

SEQ ID NO: 32479 - protein, 10 aa, Artificial Sequence
  Description of Artificial Sequence: Synthetic epitope
PGNVLATLNG

SEQ ID NO: 32480 - protein, 10 aa, Artificial Sequence
  Description of Artificial Sequence: Synthetic epitope
PGPESSKESS

SEQ ID NO: 32481 - protein, 10 aa, Artificial Sequence
  Description of Artificial Sequence: Synthetic epitope
PGPINKTTER

SEQ ID NO: 32482 - protein, 10 aa, Artificial Sequence
  Description of Artificial Sequence: Synthetic epitope
PGPNQMSGHH

SEQ ID NO: 32483 - protein, 10 aa, Artificial Sequence
  Description of Artificial Sequence: Synthetic epitope
PGPSLESEDF

SEQ ID NO: 32484 - protein, 10 aa, Artificial Sequence
  Description of Artificial Sequence: Synthetic epitope
PGQAKIAGGA

SEQ ID NO: 32485 - protein, 10 aa, Artificial Sequence
  Description of Artificial Sequence: Synthetic epitope
PGQAQALEEA

SEQ ID NO: 32486 - protein, 10 aa, Artificial Sequence
  Description of Artificial Sequence: Synthetic epitope
PGQEAVKYQG

SEQ ID NO: 32487 - protein, 10 aa, Artificial Sequence
  Description of Artificial Sequence: Synthetic epitope
PGQMKKTTRS

SEQ ID NO: 32488 - protein, 10 aa, Artificial Sequence
  Description of Artificial Sequence: Synthetic epitope
PGQNMKGSRS

SEQ ID NO: 32489 - protein, 10 aa, Artificial Sequence
  Description of Artificial Sequence: Synthetic epitope
PGQNSLSQSK

SEQ ID NO: 32490 - protein, 10 aa, Artificial Sequence
  Description of Artificial Sequence: Synthetic epitope
PGQRFGLQEQ

SEQ ID NO: 32491 - protein, 10 aa, Artificial Sequence
  Description of Artificial Sequence: Synthetic epitope
PGQTRSSMVQ

SEQ ID NO: 32492 - protein, 10 aa, Artificial Sequence
  Description of Artificial Sequence: Synthetic epitope
PGQTSSEIAG

SEQ ID NO: 32493 - protein, 10 aa, Artificial Sequence
  Description of Artificial Sequence: Synthetic epitope
PGRKSKESSP

SEQ ID NO: 32494 - protein, 10 aa, Artificial Sequence
  Description of Artificial Sequence: Synthetic epitope
PGRMLSTRRE

SEQ ID NO: 32495 - protein, 10 aa, Artificial Sequence
  Description of Artificial Sequence: Synthetic epitope
PGRQESLQAE

SEQ ID NO: 32496 - protein, 10 aa, Artificial Sequence
  Description of Artificial Sequence: Synthetic epitope
PGRRAKSRSL

SEQ ID NO: 32497 - protein, 10 aa, Artificial Sequence
  Description of Artificial Sequence: Synthetic epitope
PGRSLATPAP

SEQ ID NO: 32498 - protein, 10 aa, Artificial Sequence
  Description of Artificial Sequence: Synthetic epitope
PGRTAASGAA

SEQ ID NO: 32499 - protein, 10 aa, Artificial Sequence
  Description of Artificial Sequence: Synthetic epitope
PGRTSSTLSE

SEQ ID NO: 32500 - protein, 10 aa, Artificial Sequence
  Description of Artificial Sequence: Synthetic epitope
PGRVASSGLQ

SEQ ID NO: 32501 - protein, 10 aa, Artificial Sequence
  Description of Artificial Sequence: Synthetic epitope
PGSAQISTKQ

SEQ ID NO: 32502 - protein, 10 aa, Artificial Sequence
  Description of Artificial Sequence: Synthetic epitope
PGSASMSRSA

SEQ ID NO: 32503 - protein, 10 aa, Artificial Sequence
  Description of Artificial Sequence: Synthetic epitope
PGSDYIIKEK

SEQ ID NO: 32504 - protein, 10 aa, Artificial Sequence
  Description of Artificial Sequence: Synthetic epitope
PGSEKSTLPG

SEQ ID NO: 32505 - protein, 10 aa, Artificial Sequence
  Description of Artificial Sequence: Synthetic epitope
PGSIALKKVK

SEQ ID NO: 32506 - protein, 10 aa, Artificial Sequence
  Description of Artificial Sequence: Synthetic epitope
PGSITTSSFA

SEQ ID NO: 32507 - protein, 10 aa, Artificial Sequence
  Description of Artificial Sequence: Synthetic epitope
PGSLATTQKN

SEQ ID NO: 32508 - protein, 10 aa, Artificial Sequence
  Description of Artificial Sequence: Synthetic epitope
PGSMIVSSDD

SEQ ID NO: 32509 - protein, 10 aa, Artificial Sequence
  Description of Artificial Sequence: Synthetic epitope
PGSNWEGTNT

SEQ ID NO: 32510 - protein, 10 aa, Artificial Sequence
  Description of Artificial Sequence: Synthetic epitope
PGSQNKASDG

SEQ ID NO: 32511 - protein, 10 aa, Artificial Sequence
  Description of Artificial Sequence: Synthetic epitope
PGSSKDDVIE

SEQ ID NO: 32512 - protein, 10 aa, Artificial Sequence
  Description of Artificial Sequence: Synthetic epitope
PGSSVRARET

SEQ ID NO: 32513 - protein, 10 aa, Artificial Sequence
  Description of Artificial Sequence: Synthetic epitope
PGSTALKTPT

SEQ ID NO: 32514 - protein, 10 aa, Artificial Sequence
  Description of Artificial Sequence: Synthetic epitope
PGSTKTSSRE

SEQ ID NO: 32515 - protein, 10 aa, Artificial Sequence
  Description of Artificial Sequence: Synthetic epitope
PGSTSSLERR

SEQ ID NO: 32516 - protein, 10 aa, Artificial Sequence
  Description of Artificial Sequence: Synthetic epitope
PGSVAKMESN

SEQ ID NO: 32517 - protein, 10 aa, Artificial Sequence
  Description of Artificial Sequence: Synthetic epitope
PGSVATVATQ

SEQ ID NO: 32518 - protein, 10 aa, Artificial Sequence
  Description of Artificial Sequence: Synthetic epitope
PGTASSQSAS

SEQ ID NO: 32519 - protein, 10 aa, Artificial Sequence
  Description of Artificial Sequence: Synthetic epitope
PGTELQMQAM

SEQ ID NO: 32520 - protein, 10 aa, Artificial Sequence
  Description of Artificial Sequence: Synthetic epitope
PGTETETGLP

SEQ ID NO: 32521 - protein, 10 aa, Artificial Sequence
  Description of Artificial Sequence: Synthetic epitope
PGTQASEDTE

SEQ ID NO: 32522 - protein, 10 aa, Artificial Sequence
  Description of Artificial Sequence: Synthetic epitope
PGTQVSVTSS

SEQ ID NO: 32523 - protein, 10 aa, Artificial Sequence
  Description of Artificial Sequence: Synthetic epitope
PGTSNSSRLS

SEQ ID NO: 32524 - protein, 10 aa, Artificial Sequence
  Description of Artificial Sequence: Synthetic epitope
PGTSRSMGNL

SEQ ID NO: 32525 - protein, 10 aa, Artificial Sequence
  Description of Artificial Sequence: Synthetic epitope
PGTSSQIRSP

SEQ ID NO: 32526 - protein, 10 aa, Artificial Sequence
  Description of Artificial Sequence: Synthetic epitope
PGTVEKEAKK

SEQ ID NO: 32527 - protein, 10 aa, Artificial Sequence
  Description of Artificial Sequence: Synthetic epitope
PGTVMAQREN

SEQ ID NO: 32528 - protein, 10 aa, Artificial Sequence
  Description of Artificial Sequence: Synthetic epitope
PGVAEHKDIS

SEQ ID NO: 32529 - protein, 10 aa, Artificial Sequence
  Description of Artificial Sequence: Synthetic epitope
PGVEVEVTIA

SEQ ID NO: 32530 - protein, 10 aa, Artificial Sequence
  Description of Artificial Sequence: Synthetic epitope
PGVINNVLAT

SEQ ID NO: 32531 - protein, 10 aa, Artificial Sequence
  Description of Artificial Sequence: Synthetic epitope
PGVKQARILG

SEQ ID NO: 32532 - protein, 10 aa, Artificial Sequence
  Description of Artificial Sequence: Synthetic epitope
PGVQSVEPTH

SEQ ID NO: 32533 - protein, 10 aa, Artificial Sequence
  Description of Artificial Sequence: Synthetic epitope
PGVRMRFKKT

SEQ ID NO: 32534 - protein, 10 aa, Artificial Sequence
  Description of Artificial Sequence: Synthetic epitope
PGVSLAASPV

SEQ ID NO: 32535 - protein, 10 aa, Artificial Sequence
  Description of Artificial Sequence: Synthetic epitope
PGVSTNSASS

SEQ ID NO: 32536 - protein, 10 aa, Artificial Sequence
  Description of Artificial Sequence: Synthetic epitope
PGVVKAALKQ

SEQ ID NO: 32537 - protein, 10 aa, Artificial Sequence
  Description of Artificial Sequence: Synthetic epitope
PGVVLSMERA

SEQ ID NO: 32538 - protein, 10 aa, Artificial Sequence
  Description of Artificial Sequence: Synthetic epitope
PGWSVVAQSL

SEQ ID NO: 32539 - protein, 10 aa, Artificial Sequence
  Description of Artificial Sequence: Synthetic epitope
PGYLAITKKV

SEQ ID NO: 32540 - protein, 10 aa, Artificial Sequence
  Description of Artificial Sequence: Synthetic epitope
PGYNNDTGKI

SEQ ID NO: 32541 - protein, 10 aa, Artificial Sequence
  Description of Artificial Sequence: Synthetic epitope
PGYSSAEYRL

SEQ ID NO: 32542 - protein, 10 aa, Artificial Sequence
  Description of Artificial Sequence: Synthetic epitope
PGYSTQTHVN

SEQ ID NO: 32543 - protein, 10 aa, Artificial Sequence
  Description of Artificial Sequence: Synthetic epitope
PGYVGGIQEG

SEQ ID NO: 32544 - protein, 10 aa, Artificial Sequence
  Description of Artificial Sequence: Synthetic epitope
PHAEAHEFWK

SEQ ID NO: 32545 - protein, 10 aa, Artificial Sequence
  Description of Artificial Sequence: Synthetic epitope
PHALLVYPTL

SEQ ID NO: 32546 - protein, 10 aa, Artificial Sequence
  Description of Artificial Sequence: Synthetic epitope
PHAQVLSYEV

SEQ ID NO: 32547 - protein, 10 aa, Artificial Sequence
  Description of Artificial Sequence: Synthetic epitope
PHAVEISRES

SEQ ID NO: 32548 - protein, 10 aa, Artificial Sequence
  Description of Artificial Sequence: Synthetic epitope
PHDSKARRLF

SEQ ID NO: 32549 - protein, 10 aa, Artificial Sequence
  Description of Artificial Sequence: Synthetic epitope
PHEIMRRESN

SEQ ID NO: 32550 - protein, 10 aa, Artificial Sequence
  Description of Artificial Sequence: Synthetic epitope
PHELSTSQND

SEQ ID NO: 32551 - protein, 10 aa, Artificial Sequence
  Description of Artificial Sequence: Synthetic epitope
PHFKSMYLAY

SEQ ID NO: 32552 - protein, 10 aa, Artificial Sequence
  Description of Artificial Sequence: Synthetic epitope
PHFSVSIEPE

SEQ ID NO: 32553 - protein, 10 aa, Artificial Sequence
  Description of Artificial Sequence: Synthetic epitope
PHGKTQTMSP

SEQ ID NO: 32554 - protein, 10 aa, Artificial Sequence
  Description of Artificial Sequence: Synthetic epitope
PHHRAKEQSQ

SEQ ID NO: 32555 - protein, 10 aa, Artificial Sequence
  Description of Artificial Sequence: Synthetic epitope
PHIQNQIAEN

SEQ ID NO: 32556 - protein, 10 aa, Artificial Sequence
  Description of Artificial Sequence: Synthetic epitope
PHIRPGVKQA

SEQ ID NO: 32557 - protein, 10 aa, Artificial Sequence
  Description of Artificial Sequence: Synthetic epitope
PHKMKSLLGQ

SEQ ID NO: 32558 - protein, 10 aa, Artificial Sequence
  Description of Artificial Sequence: Synthetic epitope
PHKNSASVQN

SEQ ID NO: 32559 - protein, 10 aa, Artificial Sequence
  Description of Artificial Sequence: Synthetic epitope
PHKTTKDIKE

SEQ ID NO: 32560 - protein, 10 aa, Artificial Sequence
  Description of Artificial Sequence: Synthetic epitope
PHLAADMQAS

SEQ ID NO: 32561 - protein, 10 aa, Artificial Sequence
  Description of Artificial Sequence: Synthetic epitope
PHLKLARVQS

SEQ ID NO: 32562 - protein, 10 aa, Artificial Sequence
  Description of Artificial Sequence: Synthetic epitope
PHLMAMNSIF

SEQ ID NO: 32563 - protein, 10 aa, Artificial Sequence
  Description of Artificial Sequence: Synthetic epitope
PHLRRDSKKE

SEQ ID NO: 32564 - protein, 10 aa, Artificial Sequence
  Description of Artificial Sequence: Synthetic epitope
PHLTASTIHL

SEQ ID NO: 32565 - protein, 10 aa, Artificial Sequence
  Description of Artificial Sequence: Synthetic epitope
PHMEMSPWFQ

SEQ ID NO: 32566 - protein, 10 aa, Artificial Sequence
  Description of Artificial Sequence: Synthetic epitope
PHNSETIPSA

SEQ ID NO: 32567 - protein, 10 aa, Artificial Sequence
  Description of Artificial Sequence: Synthetic epitope
PHPDVSESTM

SEQ ID NO: 32568 - protein, 10 aa, Artificial Sequence
  Description of Artificial Sequence: Synthetic epitope
PHPLFASQQR

SEQ ID NO: 32569 - protein, 10 aa, Artificial Sequence
  Description of Artificial Sequence: Synthetic epitope
PHQDTMQRPQ

SEQ ID NO: 32570 - protein, 10 aa, Artificial Sequence
  Description of Artificial Sequence: Synthetic epitope
PHQYSLKLEK

SEQ ID NO: 32571 - protein, 10 aa, Artificial Sequence
  Description of Artificial Sequence: Synthetic epitope
PHRAPITKQN

SEQ ID NO: 32572 - protein, 10 aa, Artificial Sequence
  Description of Artificial Sequence: Synthetic epitope
PHRVQSKEPT

SEQ ID NO: 32573 - protein, 10 aa, Artificial Sequence
  Description of Artificial Sequence: Synthetic epitope
PHSASALDQS

SEQ ID NO: 32574 - protein, 10 aa, Artificial Sequence
  Description of Artificial Sequence: Synthetic epitope
PHSASSASLH

SEQ ID NO: 32575 - protein, 10 aa, Artificial Sequence
  Description of Artificial Sequence: Synthetic epitope
PHSIVDEVSQ

SEQ ID NO: 32576 - protein, 10 aa, Artificial Sequence
  Description of Artificial Sequence: Synthetic epitope
PHSPKEESER

SEQ ID NO: 32577 - protein, 10 aa, Artificial Sequence
  Description of Artificial Sequence: Synthetic epitope
PHSSATDDLH

SEQ ID NO: 32578 - protein, 10 aa, Artificial Sequence
  Description of Artificial Sequence: Synthetic epitope
PHSSATESAS

SEQ ID NO: 32579 - protein, 10 aa, Artificial Sequence
  Description of Artificial Sequence: Synthetic epitope
PHTQSTSVDT

SEQ ID NO: 32580 - protein, 10 aa, Artificial Sequence
  Description of Artificial Sequence: Synthetic epitope
PHTRVSMATV

SEQ ID NO: 32581 - protein, 10 aa, Artificial Sequence
  Description of Artificial Sequence: Synthetic epitope
PHTTIYNVKE

SEQ ID NO: 32582 - protein, 10 aa, Artificial Sequence
  Description of Artificial Sequence: Synthetic epitope
PHVDQYEAKE

SEQ ID NO: 32583 - protein, 10 aa, Artificial Sequence
  Description of Artificial Sequence: Synthetic epitope
PHVENRQMAY

SEQ ID NO: 32584 - protein, 10 aa, Artificial Sequence
  Description of Artificial Sequence: Synthetic epitope
PHVRADKKLS

SEQ ID NO: 32585 - protein, 10 aa, Artificial Sequence
  Description of Artificial Sequence: Synthetic epitope
PHVSANAWSP

SEQ ID NO: 32586 - protein, 10 aa, Artificial Sequence
  Description of Artificial Sequence: Synthetic epitope
PHVTDSKRVQ

SEQ ID NO: 32587 - protein, 10 aa, Artificial Sequence
  Description of Artificial Sequence: Synthetic epitope
PHVVDLKVTK

SEQ ID NO: 32588 - protein, 10 aa, Artificial Sequence
  Description of Artificial Sequence: Synthetic epitope
PHWESRAPRK

SEQ ID NO: 32589 - protein, 10 aa, Artificial Sequence
  Description of Artificial Sequence: Synthetic epitope
PIAFVKDILF

SEQ ID NO: 32590 - protein, 10 aa, Artificial Sequence
  Description of Artificial Sequence: Synthetic epitope
PIAGRHRMDA

SEQ ID NO: 32591 - protein, 10 aa, Artificial Sequence
  Description of Artificial Sequence: Synthetic epitope
PIAIKAVPPS

SEQ ID NO: 32592 - protein, 10 aa, Artificial Sequence
  Description of Artificial Sequence: Synthetic epitope
PIALSKNQEI

SEQ ID NO: 32593 - protein, 10 aa, Artificial Sequence
  Description of Artificial Sequence: Synthetic epitope
PIATTAKLVN

SEQ ID NO: 32594 - protein, 10 aa, Artificial Sequence
  Description of Artificial Sequence: Synthetic epitope
PIDEKKFEKT

SEQ ID NO: 32595 - protein, 10 aa, Artificial Sequence
  Description of Artificial Sequence: Synthetic epitope
PIDENLGQTG

SEQ ID NO: 32596 - protein, 10 aa, Artificial Sequence
  Description of Artificial Sequence: Synthetic epitope
PIDGQAHIKE

SEQ ID NO: 32597 - protein, 10 aa, Artificial Sequence
  Description of Artificial Sequence: Synthetic epitope
PIDLNEHKDY

SEQ ID NO: 32598 - protein, 10 aa, Artificial Sequence
  Description of Artificial Sequence: Synthetic epitope
PIDNTKIAVT

SEQ ID NO: 32599 - protein, 10 aa, Artificial Sequence
  Description of Artificial Sequence: Synthetic epitope
PIDQLQLSKP

SEQ ID NO: 32600 - protein, 10 aa, Artificial Sequence
  Description of Artificial Sequence: Synthetic epitope
PIDQMRDHVP

SEQ ID NO: 32601 - protein, 10 aa, Artificial Sequence
  Description of Artificial Sequence: Synthetic epitope
PIDSKKMRNL

SEQ ID NO: 32602 - protein, 10 aa, Artificial Sequence
  Description of Artificial Sequence: Synthetic epitope
PIDSVLKSEE

SEQ ID NO: 32603 - protein, 10 aa, Artificial Sequence
  Description of Artificial Sequence: Synthetic epitope
PIDTTMDEEQ

SEQ ID NO: 32604 - protein, 10 aa, Artificial Sequence
  Description of Artificial Sequence: Synthetic epitope
PIEDASNKLP

SEQ ID NO: 32605 - protein, 10 aa, Artificial Sequence
  Description of Artificial Sequence: Synthetic epitope
PIEDASNKLP

SEQ ID NO: 32606 - protein, 10 aa, Artificial Sequence
  Description of Artificial Sequence: Synthetic epitope
PIEDEAVIAS

SEQ ID NO: 32607 - protein, 10 aa, Artificial Sequence
  Description of Artificial Sequence: Synthetic epitope
PIEEKTVEVN

SEQ ID NO: 32608 - protein, 10 aa, Artificial Sequence
  Description of Artificial Sequence: Synthetic epitope
PIEGSENPER

SEQ ID NO: 32609 - protein, 10 aa, Artificial Sequence
  Description of Artificial Sequence: Synthetic epitope
PIELTSVVPE

SEQ ID NO: 32610 - protein, 10 aa, Artificial Sequence
  Description of Artificial Sequence: Synthetic epitope
PIENLSSIQQ

SEQ ID NO: 32611 - protein, 10 aa, Artificial Sequence
  Description of Artificial Sequence: Synthetic epitope
PIEQKHEVWG

SEQ ID NO: 32612 - protein, 10 aa, Artificial Sequence
  Description of Artificial Sequence: Synthetic epitope
PIESHQVEKR

SEQ ID NO: 32613 - protein, 10 aa, Artificial Sequence
  Description of Artificial Sequence: Synthetic epitope
PIESTIYPIS

SEQ ID NO: 32614 - protein, 10 aa, Artificial Sequence
  Description of Artificial Sequence: Synthetic epitope
PIFNASVHSD

SEQ ID NO: 32615 - protein, 10 aa, Artificial Sequence
  Description of Artificial Sequence: Synthetic epitope
PIFSVSSAIT

SEQ ID NO: 32616 - protein, 10 aa, Artificial Sequence
  Description of Artificial Sequence: Synthetic epitope
PIGTDRNHNR

SEQ ID NO: 32617 - protein, 10 aa, Artificial Sequence
  Description of Artificial Sequence: Synthetic epitope
PIHLHQISAS

SEQ ID NO: 32618 - protein, 10 aa, Artificial Sequence
  Description of Artificial Sequence: Synthetic epitope
PIIDGAKEVS

SEQ ID NO: 32619 - protein, 10 aa, Artificial Sequence
  Description of Artificial Sequence: Synthetic epitope
PIIFFSGLIS

SEQ ID NO: 32620 - protein, 10 aa, Artificial Sequence
  Description of Artificial Sequence: Synthetic epitope
PIISSQTSDS

SEQ ID NO: 32621 - protein, 10 aa, Artificial Sequence
  Description of Artificial Sequence: Synthetic epitope
PIIVLPLKSS

SEQ ID NO: 32622 - protein, 10 aa, Artificial Sequence
  Description of Artificial Sequence: Synthetic epitope
PIKEIVEMNE

SEQ ID NO: 32623 - protein, 10 aa, Artificial Sequence
  Description of Artificial Sequence: Synthetic epitope
PIKETVSSRQ

SEQ ID NO: 32624 - protein, 10 aa, Artificial Sequence
  Description of Artificial Sequence: Synthetic epitope
PIKIVHSESQ

SEQ ID NO: 32625 - protein, 10 aa, Artificial Sequence
  Description of Artificial Sequence: Synthetic epitope
PIKKEESTKH

SEQ ID NO: 32626 - protein, 10 aa, Artificial Sequence
  Description of Artificial Sequence: Synthetic epitope
PIKLELLEPK

SEQ ID NO: 32627 - protein, 10 aa, Artificial Sequence
  Description of Artificial Sequence: Synthetic epitope
PIKNKPSKSN

SEQ ID NO: 32628 - protein, 10 aa, Artificial Sequence
  Description of Artificial Sequence: Synthetic epitope
PIKPIYKSQA

SEQ ID NO: 32629 - protein, 10 aa, Artificial Sequence
  Description of Artificial Sequence: Synthetic epitope
PIKQSKSDKQ

SEQ ID NO: 32630 - protein, 10 aa, Artificial Sequence
  Description of Artificial Sequence: Synthetic epitope
PIKSRDTLQK

SEQ ID NO: 32631 - protein, 10 aa, Artificial Sequence
  Description of Artificial Sequence: Synthetic epitope
PIKVASGSDL

SEQ ID NO: 32632 - protein, 10 aa, Artificial Sequence
  Description of Artificial Sequence: Synthetic epitope
PILASVSTPA

SEQ ID NO: 32633 - protein, 10 aa, Artificial Sequence
  Description of Artificial Sequence: Synthetic epitope
PILAVMESHA

SEQ ID NO: 32634 - protein, 10 aa, Artificial Sequence
  Description of Artificial Sequence: Synthetic epitope
PILEPAQWIS

SEQ ID NO: 32635 - protein, 10 aa, Artificial Sequence
  Description of Artificial Sequence: Synthetic epitope
PILKNKEYHQ

SEQ ID NO: 32636 - protein, 10 aa, Artificial Sequence
  Description of Artificial Sequence: Synthetic epitope
PILPIRKRVK

SEQ ID NO: 32637 - protein, 10 aa, Artificial Sequence
  Description of Artificial Sequence: Synthetic epitope
PILPSREAAE

SEQ ID NO: 32638 - protein, 10 aa, Artificial Sequence
  Description of Artificial Sequence: Synthetic epitope
PILSKVLRPH

SEQ ID NO: 32639 - protein, 10 aa, Artificial Sequence
  Description of Artificial Sequence: Synthetic epitope
PIMDQLVGAA

SEQ ID NO: 32640 - protein, 10 aa, Artificial Sequence
  Description of Artificial Sequence: Synthetic epitope
PIMEQWDQPE

SEQ ID NO: 32641 - protein, 10 aa, Artificial Sequence
  Description of Artificial Sequence: Synthetic epitope
PINAESLGKS

SEQ ID NO: 32642 - protein, 10 aa, Artificial Sequence
  Description of Artificial Sequence: Synthetic epitope
PINANAIKAE

SEQ ID NO: 32643 - protein, 10 aa, Artificial Sequence
  Description of Artificial Sequence: Synthetic epitope
PININATQIT

SEQ ID NO: 32644 - protein, 10 aa, Artificial Sequence
  Description of Artificial Sequence: Synthetic epitope
PIPKISLENV

SEQ ID NO: 32645 - protein, 10 aa, Artificial Sequence
  Description of Artificial Sequence: Synthetic epitope
PIPPQVKSSE

SEQ ID NO: 32646 - protein, 10 aa, Artificial Sequence
  Description of Artificial Sequence: Synthetic epitope
PIQAEVKGAT

SEQ ID NO: 32647 - protein, 10 aa, Artificial Sequence
  Description of Artificial Sequence: Synthetic epitope
PIQDSLSQAQ

SEQ ID NO: 32648 - protein, 10 aa, Artificial Sequence
  Description of Artificial Sequence: Synthetic epitope
PIQFRMMTGR

SEQ ID NO: 32649 - protein, 10 aa, Artificial Sequence
  Description of Artificial Sequence: Synthetic epitope
PIQKVQDDTK

SEQ ID NO: 32650 - protein, 10 aa, Artificial Sequence
  Description of Artificial Sequence: Synthetic epitope
PIQLGSLVTQ

SEQ ID NO: 32651 - protein, 10 aa, Artificial Sequence
  Description of Artificial Sequence: Synthetic epitope
PIQLSKITEN

SEQ ID NO: 32652 - protein, 10 aa, Artificial Sequence
  Description of Artificial Sequence: Synthetic epitope
PIQRRKKPAS

SEQ ID NO: 32653 - protein, 10 aa, Artificial Sequence
  Description of Artificial Sequence: Synthetic epitope
PIRADSMRNQ

SEQ ID NO: 32654 - protein, 10 aa, Artificial Sequence
  Description of Artificial Sequence: Synthetic epitope
PIRMLEIEGE

SEQ ID NO: 32655 - protein, 10 aa, Artificial Sequence
  Description of Artificial Sequence: Synthetic epitope
PIRTLVQRIH

SEQ ID NO: 32656 - protein, 10 aa, Artificial Sequence
  Description of Artificial Sequence: Synthetic epitope
PISATTEGSS

SEQ ID NO: 32657 - protein, 10 aa, Artificial Sequence
  Description of Artificial Sequence: Synthetic epitope
PISEAVEVKD

SEQ ID NO: 32658 - protein, 10 aa, Artificial Sequence
  Description of Artificial Sequence: Synthetic epitope
PISEEQNSVP

SEQ ID NO: 32659 - protein, 10 aa, Artificial Sequence
  Description of Artificial Sequence: Synthetic epitope
PISENSRSVA

SEQ ID NO: 32660 - protein, 10 aa, Artificial Sequence
  Description of Artificial Sequence: Synthetic epitope
PISGLEVLEA

SEQ ID NO: 32661 - protein, 10 aa, Artificial Sequence
  Description of Artificial Sequence: Synthetic epitope
PISKAENEHR

SEQ ID NO: 32662 - protein, 10 aa, Artificial Sequence
  Description of Artificial Sequence: Synthetic epitope
PISKSEALQR

SEQ ID NO: 32663 - protein, 10 aa, Artificial Sequence
  Description of Artificial Sequence: Synthetic epitope
PISLEVSQDR

SEQ ID NO: 32664 - protein, 10 aa, Artificial Sequence
  Description of Artificial Sequence: Synthetic epitope
PISNITENVY

SEQ ID NO: 32665 - protein, 10 aa, Artificial Sequence
  Description of Artificial Sequence: Synthetic epitope
PISQQPQKSA

SEQ ID NO: 32666 - protein, 10 aa, Artificial Sequence
  Description of Artificial Sequence: Synthetic epitope
PISRTYTRKK

SEQ ID NO: 32667 - protein, 10 aa, Artificial Sequence
  Description of Artificial Sequence: Synthetic epitope
PISSISADSF

SEQ ID NO: 32668 - protein, 10 aa, Artificial Sequence
  Description of Artificial Sequence: Synthetic epitope
PISSQMMHHP

SEQ ID NO: 32669 - protein, 10 aa, Artificial Sequence
  Description of Artificial Sequence: Synthetic epitope
PISSTPSKSV

SEQ ID NO: 32670 - protein, 10 aa, Artificial Sequence
  Description of Artificial Sequence: Synthetic epitope
PISTSKPLTA

SEQ ID NO: 32671 - protein, 10 aa, Artificial Sequence
  Description of Artificial Sequence: Synthetic epitope
PISTVQKTLQ

SEQ ID NO: 32672 - protein, 10 aa, Artificial Sequence
  Description of Artificial Sequence: Synthetic epitope
PITAKAKVVI

SEQ ID NO: 32673 - protein, 10 aa, Artificial Sequence
  Description of Artificial Sequence: Synthetic epitope
PITAVKQPEK

SEQ ID NO: 32674 - protein, 10 aa, Artificial Sequence
  Description of Artificial Sequence: Synthetic epitope
PITDNTEVDT

SEQ ID NO: 32675 - protein, 10 aa, Artificial Sequence
  Description of Artificial Sequence: Synthetic epitope
PITKTVEGTQ

SEQ ID NO: 32676 - protein, 10 aa, Artificial Sequence
  Description of Artificial Sequence: Synthetic epitope
PITLKASESK

SEQ ID NO: 32677 - protein, 10 aa, Artificial Sequence
  Description of Artificial Sequence: Synthetic epitope
PITSSVSTIR

SEQ ID NO: 32678 - protein, 10 aa, Artificial Sequence
  Description of Artificial Sequence: Synthetic epitope
PITVSVDVEP

SEQ ID NO: 32679 - protein, 10 aa, Artificial Sequence
  Description of Artificial Sequence: Synthetic epitope
PITVSYAFKK

SEQ ID NO: 32680 - protein, 10 aa, Artificial Sequence
  Description of Artificial Sequence: Synthetic epitope
PITVTKLVTV

SEQ ID NO: 32681 - protein, 10 aa, Artificial Sequence
  Description of Artificial Sequence: Synthetic epitope
PIVKSAKFVT

SEQ ID NO: 32682 - protein, 10 aa, Artificial Sequence
  Description of Artificial Sequence: Synthetic epitope
PIVQGKSRPI

SEQ ID NO: 32683 - protein, 10 aa, Artificial Sequence
  Description of Artificial Sequence: Synthetic epitope
PIVQKTARVS

SEQ ID NO: 32684 - protein, 10 aa, Artificial Sequence
  Description of Artificial Sequence: Synthetic epitope
PIVRQKESEL

SEQ ID NO: 32685 - protein, 10 aa, Artificial Sequence
  Description of Artificial Sequence: Synthetic epitope
PIWVSVLLKK

SEQ ID NO: 32686 - protein, 10 aa, Artificial Sequence
  Description of Artificial Sequence: Synthetic epitope
PIYEEATLNP

SEQ ID NO: 32687 - protein, 10 aa, Artificial Sequence
  Description of Artificial Sequence: Synthetic epitope
PKAANTATEE

SEQ ID NO: 32688 - protein, 10 aa, Artificial Sequence
  Description of Artificial Sequence: Synthetic epitope
PKAAYRLEQP

SEQ ID NO: 32689 - protein, 10 aa, Artificial Sequence
  Description of Artificial Sequence: Synthetic epitope
PKADVKRQRI

SEQ ID NO: 32690 - protein, 10 aa, Artificial Sequence
  Description of Artificial Sequence: Synthetic epitope
PKAEVARAQA

SEQ ID NO: 32691 - protein, 10 aa, Artificial Sequence
  Description of Artificial Sequence: Synthetic epitope
PKAGKTAMNG

SEQ ID NO: 32692 - protein, 10 aa, Artificial Sequence
  Description of Artificial Sequence: Synthetic epitope
PKAKERTREP

SEQ ID NO: 32693 - protein, 10 aa, Artificial Sequence
  Description of Artificial Sequence: Synthetic epitope
PKAKKSKEIS

SEQ ID NO: 32694 - protein, 10 aa, Artificial Sequence
  Description of Artificial Sequence: Synthetic epitope
PKAKQENRPQ

SEQ ID NO: 32695 - protein, 10 aa, Artificial Sequence
  Description of Artificial Sequence: Synthetic epitope
PKALLAERAH

SEQ ID NO: 32696 - protein, 10 aa, Artificial Sequence
  Description of Artificial Sequence: Synthetic epitope
PKANEQLNRR

SEQ ID NO: 32697 - protein, 10 aa, Artificial Sequence
  Description of Artificial Sequence: Synthetic epitope
PKAQIKESLR

SEQ ID NO: 32698 - protein, 10 aa, Artificial Sequence
  Description of Artificial Sequence: Synthetic epitope
PKAQQLSLQT

SEQ ID NO: 32699 - protein, 10 aa, Artificial Sequence
  Description of Artificial Sequence: Synthetic epitope
PKARTGISKP

SEQ ID NO: 32700 - protein, 10 aa, Artificial Sequence
  Description of Artificial Sequence: Synthetic epitope
PKASARNARG

SEQ ID NO: 32701 - protein, 10 aa, Artificial Sequence
  Description of Artificial Sequence: Synthetic epitope
PKASEQAELP

SEQ ID NO: 32702 - protein, 10 aa, Artificial Sequence
  Description of Artificial Sequence: Synthetic epitope
PKASVAEAPS

SEQ ID NO: 32703 - protein, 10 aa, Artificial Sequence
  Description of Artificial Sequence: Synthetic epitope
PKASVSLIRK

SEQ ID NO: 32704 - protein, 10 aa, Artificial Sequence
  Description of Artificial Sequence: Synthetic epitope
PKAVASSPAA

SEQ ID NO: 32705 - protein, 10 aa, Artificial Sequence
  Description of Artificial Sequence: Synthetic epitope
PKAVVPVSKT

SEQ ID NO: 32706 - protein, 10 aa, Artificial Sequence
  Description of Artificial Sequence: Synthetic epitope
PKDKMSALAA

SEQ ID NO: 32707 - protein, 10 aa, Artificial Sequence
  Description of Artificial Sequence: Synthetic epitope
PKDKVDSKDS

SEQ ID NO: 32708 - protein, 10 aa, Artificial Sequence
  Description of Artificial Sequence: Synthetic epitope
PKDMLEQLLK

SEQ ID NO: 32709 - protein, 10 aa, Artificial Sequence
  Description of Artificial Sequence: Synthetic epitope
PKDVKKEKLS

SEQ ID NO: 32710 - protein, 10 aa, Artificial Sequence
  Description of Artificial Sequence: Synthetic epitope
PKEEAAYQLA

SEQ ID NO: 32711 - protein, 10 aa, Artificial Sequence
  Description of Artificial Sequence: Synthetic epitope
PKEEKSQLLE

SEQ ID NO: 32712 - protein, 10 aa, Artificial Sequence
  Description of Artificial Sequence: Synthetic epitope
PKEHEAQSNA

SEQ ID NO: 32713 - protein, 10 aa, Artificial Sequence
  Description of Artificial Sequence: Synthetic epitope
PKEKMADEQG

SEQ ID NO: 32714 - protein, 10 aa, Artificial Sequence
  Description of Artificial Sequence: Synthetic epitope
PKEKQLKNEE

SEQ ID NO: 32715 - protein, 10 aa, Artificial Sequence
  Description of Artificial Sequence: Synthetic epitope
PKEKRSSVHG

SEQ ID NO: 32716 - protein, 10 aa, Artificial Sequence
  Description of Artificial Sequence: Synthetic epitope
PKELSIKYMA

SEQ ID NO: 32717 - protein, 10 aa, Artificial Sequence
  Description of Artificial Sequence: Synthetic epitope
PKELSTVQES

SEQ ID NO: 32718 - protein, 10 aa, Artificial Sequence
  Description of Artificial Sequence: Synthetic epitope
PKENASRAKE

SEQ ID NO: 32719 - protein, 10 aa, Artificial Sequence
  Description of Artificial Sequence: Synthetic epitope
PKENVQLMSY

SEQ ID NO: 32720 - protein, 10 aa, Artificial Sequence
  Description of Artificial Sequence: Synthetic epitope
PKEPHMLFDR

SEQ ID NO: 32721 - protein, 10 aa, Artificial Sequence
  Description of Artificial Sequence: Synthetic epitope
PKEPQESDTG

SEQ ID NO: 32722 - protein, 10 aa, Artificial Sequence
  Description of Artificial Sequence: Synthetic epitope
PKEQQRTQSR

SEQ ID NO: 32723 - protein, 10 aa, Artificial Sequence
  Description of Artificial Sequence: Synthetic epitope
PKEQVESKPY

SEQ ID NO: 32724 - protein, 10 aa, Artificial Sequence
  Description of Artificial Sequence: Synthetic epitope
PKERSAQPKR

SEQ ID NO: 32725 - protein, 10 aa, Artificial Sequence
  Description of Artificial Sequence: Synthetic epitope
PKESASSNQQ

SEQ ID NO: 32726 - protein, 10 aa, Artificial Sequence
  Description of Artificial Sequence: Synthetic epitope
PKESKKRKLE

SEQ ID NO: 32727 - protein, 10 aa, Artificial Sequence
  Description of Artificial Sequence: Synthetic epitope
PKETAELSET

SEQ ID NO: 32728 - protein, 10 aa, Artificial Sequence
  Description of Artificial Sequence: Synthetic epitope
PKETAVQASN

SEQ ID NO: 32729 - protein, 10 aa, Artificial Sequence
  Description of Artificial Sequence: Synthetic epitope
PKFAVATLPP

SEQ ID NO: 32730 - protein, 10 aa, Artificial Sequence
  Description of Artificial Sequence: Synthetic epitope
PKFEVQVTVP

SEQ ID NO: 32731 - protein, 10 aa, Artificial Sequence
  Description of Artificial Sequence: Synthetic epitope
PKFKQRQTRQ

SEQ ID NO: 32732 - protein, 10 aa, Artificial Sequence
  Description of Artificial Sequence: Synthetic epitope
PKFKQRQTRQ

SEQ ID NO: 32733 - protein, 10 aa, Artificial Sequence
  Description of Artificial Sequence: Synthetic epitope
PKFKTSDVLE

SEQ ID NO: 32734 - protein, 10 aa, Artificial Sequence
  Description of Artificial Sequence: Synthetic epitope
PKFKVEVVEP

SEQ ID NO: 32735 - protein, 10 aa, Artificial Sequence
  Description of Artificial Sequence: Synthetic epitope
PKFNDKLAEG

SEQ ID NO: 32736 - protein, 10 aa, Artificial Sequence
  Description of Artificial Sequence: Synthetic epitope
PKFQAIAPLT

SEQ ID NO: 32737 - protein, 10 aa, Artificial Sequence
  Description of Artificial Sequence: Synthetic epitope
PKGIQKNAQA

SEQ ID NO: 32738 - protein, 10 aa, Artificial Sequence
  Description of Artificial Sequence: Synthetic epitope
PKGKPHAQQP

SEQ ID NO: 32739 - protein, 10 aa, Artificial Sequence
  Description of Artificial Sequence: Synthetic epitope
PKGSEKAAKA

SEQ ID NO: 32740 - protein, 10 aa, Artificial Sequence
  Description of Artificial Sequence: Synthetic epitope
PKGSIAQPAG

SEQ ID NO: 32741 - protein, 10 aa, Artificial Sequence
  Description of Artificial Sequence: Synthetic epitope
PKGSLSSAQP

SEQ ID NO: 32742 - protein, 10 aa, Artificial Sequence
  Description of Artificial Sequence: Synthetic epitope
PKGTRTISAK

SEQ ID NO: 32743 - protein, 10 aa, Artificial Sequence
  Description of Artificial Sequence: Synthetic epitope
PKHNKRAKWP

SEQ ID NO: 32744 - protein, 10 aa, Artificial Sequence
  Description of Artificial Sequence: Synthetic epitope
PKHNQIITEE

SEQ ID NO: 32745 - protein, 10 aa, Artificial Sequence
  Description of Artificial Sequence: Synthetic epitope
PKHQKKSKLH

SEQ ID NO: 32746 - protein, 10 aa, Artificial Sequence
  Description of Artificial Sequence: Synthetic epitope
PKHSLKQTQP

SEQ ID NO: 32747 - protein, 10 aa, Artificial Sequence
  Description of Artificial Sequence: Synthetic epitope
PKHTFEVRAE

SEQ ID NO: 32748 - protein, 10 aa, Artificial Sequence
  Description of Artificial Sequence: Synthetic epitope
PKIAEMPESE

SEQ ID NO: 32749 - protein, 10 aa, Artificial Sequence
  Description of Artificial Sequence: Synthetic epitope
PKIDKKIIRM

SEQ ID NO: 32750 - protein, 10 aa, Artificial Sequence
  Description of Artificial Sequence: Synthetic epitope
PKIDMERLLG

SEQ ID NO: 32751 - protein, 10 aa, Artificial Sequence
  Description of Artificial Sequence: Synthetic epitope
PKIEAVQEFT

SEQ ID NO: 32752 - protein, 10 aa, Artificial Sequence
  Description of Artificial Sequence: Synthetic epitope
PKIEAVQEFT

SEQ ID NO: 32753 - protein, 10 aa, Artificial Sequence
  Description of Artificial Sequence: Synthetic epitope
PKIKAVHMEA

SEQ ID NO: 32754 - protein, 10 aa, Artificial Sequence
  Description of Artificial Sequence: Synthetic epitope
PKIKEDDIEM

SEQ ID NO: 32755 - protein, 10 aa, Artificial Sequence
  Description of Artificial Sequence: Synthetic epitope
PKIKVVNVEL

SEQ ID NO: 32756 - protein, 10 aa, Artificial Sequence
  Description of Artificial Sequence: Synthetic epitope
PKILVKYPTF

SEQ ID NO: 32757 - protein, 10 aa, Artificial Sequence
  Description of Artificial Sequence: Synthetic epitope
PKIPQALEKI

SEQ ID NO: 32758 - protein, 10 aa, Artificial Sequence
  Description of Artificial Sequence: Synthetic epitope
PKIRARVLLQ

SEQ ID NO: 32759 - protein, 10 aa, Artificial Sequence
  Description of Artificial Sequence: Synthetic epitope
PKIRSWTSFE

SEQ ID NO: 32760 - protein, 10 aa, Artificial Sequence
  Description of Artificial Sequence: Synthetic epitope
PKISKPIKFE

SEQ ID NO: 32761 - protein, 10 aa, Artificial Sequence
  Description of Artificial Sequence: Synthetic epitope
PKISNMQKKQ

SEQ ID NO: 32762 - protein, 10 aa, Artificial Sequence
  Description of Artificial Sequence: Synthetic epitope
PKIVVPIPVH

SEQ ID NO: 32763 - protein, 10 aa, Artificial Sequence
  Description of Artificial Sequence: Synthetic epitope
PKIYEPIESF

SEQ ID NO: 32764 - protein, 10 aa, Artificial Sequence
  Description of Artificial Sequence: Synthetic epitope
PKKANIRDNG

SEQ ID NO: 32765 - protein, 10 aa, Artificial Sequence
  Description of Artificial Sequence: Synthetic epitope
PKKDLKIKNM

SEQ ID NO: 32766 - protein, 10 aa, Artificial Sequence
  Description of Artificial Sequence: Synthetic epitope
PKKEVAKKED

SEQ ID NO: 32767 - protein, 10 aa, Artificial Sequence
  Description of Artificial Sequence: Synthetic epitope
PKKFAETDMR

SEQ ID NO: 32768 - protein, 10 aa, Artificial Sequence
  Description of Artificial Sequence: Synthetic epitope
PKKHTVKKRI

SEQ ID NO: 32769 - protein, 10 aa, Artificial Sequence
  Description of Artificial Sequence: Synthetic epitope
PKKILASKYL

SEQ ID NO: 32770 - protein, 10 aa, Artificial Sequence
  Description of Artificial Sequence: Synthetic epitope
PKKLKVEAPQ

SEQ ID NO: 32771 - protein, 10 aa, Artificial Sequence
  Description of Artificial Sequence: Synthetic epitope
PKKNNKVPSR

SEQ ID NO: 32772 - protein, 10 aa, Artificial Sequence
  Description of Artificial Sequence: Synthetic epitope
PKKQNAISSN

SEQ ID NO: 32773 - protein, 10 aa, Artificial Sequence
  Description of Artificial Sequence: Synthetic epitope
PKKSQDNSVN

SEQ ID NO: 32774 - protein, 10 aa, Artificial Sequence
  Description of Artificial Sequence: Synthetic epitope
PKKSQSSKIV

SEQ ID NO: 32775 - protein, 10 aa, Artificial Sequence
  Description of Artificial Sequence: Synthetic epitope
PKLAAKHRES

SEQ ID NO: 32776 - protein, 10 aa, Artificial Sequence
  Description of Artificial Sequence: Synthetic epitope
PKLAQEILVE

SEQ ID NO: 32777 - protein, 10 aa, Artificial Sequence
  Description of Artificial Sequence: Synthetic epitope
PKLATKTSSG

SEQ ID NO: 32778 - protein, 10 aa, Artificial Sequence
  Description of Artificial Sequence: Synthetic epitope
PKLDEQEPFP

SEQ ID NO: 32779 - protein, 10 aa, Artificial Sequence
  Description of Artificial Sequence: Synthetic epitope
PKLFGLLSSP

SEQ ID NO: 32780 - protein, 10 aa, Artificial Sequence
  Description of Artificial Sequence: Synthetic epitope
PKLIKAKSTK

SEQ ID NO: 32781 - protein, 10 aa, Artificial Sequence
  Description of Artificial Sequence: Synthetic epitope
PKLIKLNPIV

SEQ ID NO: 32782 - protein, 10 aa, Artificial Sequence
  Description of Artificial Sequence: Synthetic epitope
PKLKKRALSH

SEQ ID NO: 32783 - protein, 10 aa, Artificial Sequence
  Description of Artificial Sequence: Synthetic epitope
PKLKNQRELE

SEQ ID NO: 32784 - protein, 10 aa, Artificial Sequence
  Description of Artificial Sequence: Synthetic epitope
PKLKQNAKKF

SEQ ID NO: 32785 - protein, 10 aa, Artificial Sequence
  Description of Artificial Sequence: Synthetic epitope
PKLKTALFPQ

SEQ ID NO: 32786 - protein, 10 aa, Artificial Sequence
  Description of Artificial Sequence: Synthetic epitope
PKLKTTAKKI

SEQ ID NO: 32787 - protein, 10 aa, Artificial Sequence
  Description of Artificial Sequence: Synthetic epitope
PKLNMVKFLQ

SEQ ID NO: 32788 - protein, 10 aa, Artificial Sequence
  Description of Artificial Sequence: Synthetic epitope
PKLQLLSQIR

SEQ ID NO: 32789 - protein, 10 aa, Artificial Sequence
  Description of Artificial Sequence: Synthetic epitope
PKLQSSKKVA

SEQ ID NO: 32790 - protein, 10 aa, Artificial Sequence
  Description of Artificial Sequence: Synthetic epitope
PKLRALVLLD

SEQ ID NO: 32791 - protein, 10 aa, Artificial Sequence
  Description of Artificial Sequence: Synthetic epitope
PKLSALKQLL

SEQ ID NO: 32792 - protein, 10 aa, Artificial Sequence
  Description of Artificial Sequence: Synthetic epitope
PKLSEGSSDQ

SEQ ID NO: 32793 - protein, 10 aa, Artificial Sequence
  Description of Artificial Sequence: Synthetic epitope
PKLSKSSPVG

SEQ ID NO: 32794 - protein, 10 aa, Artificial Sequence
  Description of Artificial Sequence: Synthetic epitope
PKLSLTRDKK

SEQ ID NO: 32795 - protein, 10 aa, Artificial Sequence
  Description of Artificial Sequence: Synthetic epitope
PKLSREEPSN

SEQ ID NO: 32796 - protein, 10 aa, Artificial Sequence
  Description of Artificial Sequence: Synthetic epitope
PKLSVSVRQS

SEQ ID NO: 32797 - protein, 10 aa, Artificial Sequence
  Description of Artificial Sequence: Synthetic epitope
PKLTRTQSAF

SEQ ID NO: 32798 - protein, 10 aa, Artificial Sequence
  Description of Artificial Sequence: Synthetic epitope
PKLTSSLPDV

SEQ ID NO: 32799 - protein, 10 aa, Artificial Sequence
  Description of Artificial Sequence: Synthetic epitope
PKMADVSAEE

SEQ ID NO: 32800 - protein, 10 aa, Artificial Sequence
  Description of Artificial Sequence: Synthetic epitope
PKMELHIPQK

SEQ ID NO: 32801 - protein, 10 aa, Artificial Sequence
  Description of Artificial Sequence: Synthetic epitope
PKMELLIPVK

SEQ ID NO: 32802 - protein, 10 aa, Artificial Sequence
  Description of Artificial Sequence: Synthetic epitope
PKMEVKSYTK

SEQ ID NO: 32803 - protein, 10 aa, Artificial Sequence
  Description of Artificial Sequence: Synthetic epitope
PKMKNTSSKA

SEQ ID NO: 32804 - protein, 10 aa, Artificial Sequence
  Description of Artificial Sequence: Synthetic epitope
PKMKSEDMAE

SEQ ID NO: 32805 - protein, 10 aa, Artificial Sequence
  Description of Artificial Sequence: Synthetic epitope
PKMNMITAAL

SEQ ID NO: 32806 - protein, 10 aa, Artificial Sequence
  Description of Artificial Sequence: Synthetic epitope
PKMQSKTKIY

SEQ ID NO: 32807 - protein, 10 aa, Artificial Sequence
  Description of Artificial Sequence: Synthetic epitope
PKMSNMGSPP

SEQ ID NO: 32808 - protein, 10 aa, Artificial Sequence
  Description of Artificial Sequence: Synthetic epitope
PKMVEVQNQQ

SEQ ID NO: 32809 - protein, 10 aa, Artificial Sequence
  Description of Artificial Sequence: Synthetic epitope
PKMVSEKKIY

SEQ ID NO: 32810 - protein, 10 aa, Artificial Sequence
  Description of Artificial Sequence: Synthetic epitope
PKNALPITKP

SEQ ID NO: 32811 - protein, 10 aa, Artificial Sequence
  Description of Artificial Sequence: Synthetic epitope
PKNDNKLTRQ

SEQ ID NO: 32812 - protein, 10 aa, Artificial Sequence
  Description of Artificial Sequence: Synthetic epitope
PKNDSASLPK

SEQ ID NO: 32813 - protein, 10 aa, Artificial Sequence
  Description of Artificial Sequence: Synthetic epitope
PKNEKYTPME

SEQ ID NO: 32814 - protein, 10 aa, Artificial Sequence
  Description of Artificial Sequence: Synthetic epitope
PKNKNKINLK

SEQ ID NO: 32815 - protein, 10 aa, Artificial Sequence
  Description of Artificial Sequence: Synthetic epitope
PKNNMIVGVP

SEQ ID NO: 32816 - protein, 10 aa, Artificial Sequence
  Description of Artificial Sequence: Synthetic epitope
PKNNTAAETE

SEQ ID NO: 32817 - protein, 10 aa, Artificial Sequence
  Description of Artificial Sequence: Synthetic epitope
PKNSRVSKMQ

SEQ ID NO: 32818 - protein, 10 aa, Artificial Sequence
  Description of Artificial Sequence: Synthetic epitope
PKNVQGTKIQ

SEQ ID NO: 32819 - protein, 10 aa, Artificial Sequence
  Description of Artificial Sequence: Synthetic epitope
PKNVSSATHS

SEQ ID NO: 32820 - protein, 10 aa, Artificial Sequence
  Description of Artificial Sequence: Synthetic epitope
PKPEASAKLP

SEQ ID NO: 32821 - protein, 10 aa, Artificial Sequence
  Description of Artificial Sequence: Synthetic epitope
PKPKVALVKL

SEQ ID NO: 32822 - protein, 10 aa, Artificial Sequence
  Description of Artificial Sequence: Synthetic epitope
PKPLKSQASL

SEQ ID NO: 32823 - protein, 10 aa, Artificial Sequence
  Description of Artificial Sequence: Synthetic epitope
PKPLTKVEMK

SEQ ID NO: 32824 - protein, 10 aa, Artificial Sequence
  Description of Artificial Sequence: Synthetic epitope
PKPSLAARPV

SEQ ID NO: 32825 - protein, 10 aa, Artificial Sequence
  Description of Artificial Sequence: Synthetic epitope
PKPTIILSAY

SEQ ID NO: 32826 - protein, 10 aa, Artificial Sequence
  Description of Artificial Sequence: Synthetic epitope
PKPTRVRQDA

SEQ ID NO: 32827 - protein, 10 aa, Artificial Sequence
  Description of Artificial Sequence: Synthetic epitope
PKPVSSTVSG

SEQ ID NO: 32828 - protein, 10 aa, Artificial Sequence
  Description of Artificial Sequence: Synthetic epitope
PKQASRSSDA

SEQ ID NO: 32829 - protein, 10 aa, Artificial Sequence
  Description of Artificial Sequence: Synthetic epitope
PKQEMASASS

SEQ ID NO: 32830 - protein, 10 aa, Artificial Sequence
  Description of Artificial Sequence: Synthetic epitope
PKQKLEALHL

SEQ ID NO: 32831 - protein, 10 aa, Artificial Sequence
  Description of Artificial Sequence: Synthetic epitope
PKQKLEALHL

SEQ ID NO: 32832 - protein, 10 aa, Artificial Sequence
  Description of Artificial Sequence: Synthetic epitope
PKQKLEALHL

SEQ ID NO: 32833 - protein, 10 aa, Artificial Sequence
  Description of Artificial Sequence: Synthetic epitope
PKQKLEALHL

SEQ ID NO: 32834 - protein, 10 aa, Artificial Sequence
  Description of Artificial Sequence: Synthetic epitope
PKQKLEALHL

SEQ ID NO: 32835 - protein, 10 aa, Artificial Sequence
  Description of Artificial Sequence: Synthetic epitope
PKQKLEALHL

SEQ ID NO: 32836 - protein, 10 aa, Artificial Sequence
  Description of Artificial Sequence: Synthetic epitope
PKQKLEALHL

SEQ ID NO: 32837 - protein, 10 aa, Artificial Sequence
  Description of Artificial Sequence: Synthetic epitope
PKQKLVQTQG

SEQ ID NO: 32838 - protein, 10 aa, Artificial Sequence
  Description of Artificial Sequence: Synthetic epitope
PKQLSSNSHP

SEQ ID NO: 32839 - protein, 10 aa, Artificial Sequence
  Description of Artificial Sequence: Synthetic epitope
PKQSVIDRSV

SEQ ID NO: 32840 - protein, 10 aa, Artificial Sequence
  Description of Artificial Sequence: Synthetic epitope
PKQTIKKTKR

SEQ ID NO: 32841 - protein, 10 aa, Artificial Sequence
  Description of Artificial Sequence: Synthetic epitope
PKQVQMAATH

SEQ ID NO: 32842 - protein, 10 aa, Artificial Sequence
  Description of Artificial Sequence: Synthetic epitope
PKQYLFTMKL

SEQ ID NO: 32843 - protein, 10 aa, Artificial Sequence
  Description of Artificial Sequence: Synthetic epitope
PKRDIVLDVS

SEQ ID NO: 32844 - protein, 10 aa, Artificial Sequence
  Description of Artificial Sequence: Synthetic epitope
PKREVASKDM

SEQ ID NO: 32845 - protein, 10 aa, Artificial Sequence
  Description of Artificial Sequence: Synthetic epitope
PKRKAAYDSN

SEQ ID NO: 32846 - protein, 10 aa, Artificial Sequence
  Description of Artificial Sequence: Synthetic epitope
PKRLISIFTE

SEQ ID NO: 32847 - protein, 10 aa, Artificial Sequence
  Description of Artificial Sequence: Synthetic epitope
PKRQTRQTTR

SEQ ID NO: 32848 - protein, 10 aa, Artificial Sequence
  Description of Artificial Sequence: Synthetic epitope
PKRRVQASKN

SEQ ID NO: 32849 - protein, 10 aa, Artificial Sequence
  Description of Artificial Sequence: Synthetic epitope
PKRVAASTTK

SEQ ID NO: 32850 - protein, 10 aa, Artificial Sequence
  Description of Artificial Sequence: Synthetic epitope
PKRVKAKAVP

SEQ ID NO: 32851 - protein, 10 aa, Artificial Sequence
  Description of Artificial Sequence: Synthetic epitope
PKRVREVMVA

SEQ ID NO: 32852 - protein, 10 aa, Artificial Sequence
  Description of Artificial Sequence: Synthetic epitope
PKRWDKEPLS

SEQ ID NO: 32853 - protein, 10 aa, Artificial Sequence
  Description of Artificial Sequence: Synthetic epitope
PKSADASQDS

SEQ ID NO: 32854 - protein, 10 aa, Artificial Sequence
  Description of Artificial Sequence: Synthetic epitope
PKSATAAGAQ

SEQ ID NO: 32855 - protein, 10 aa, Artificial Sequence
  Description of Artificial Sequence: Synthetic epitope
PKSEKKIKTT

SEQ ID NO: 32856 - protein, 10 aa, Artificial Sequence
  Description of Artificial Sequence: Synthetic epitope
PKSEKSSAPR

SEQ ID NO: 32857 - protein, 10 aa, Artificial Sequence
  Description of Artificial Sequence: Synthetic epitope
PKSEKYSISR

SEQ ID NO: 32858 - protein, 10 aa, Artificial Sequence
  Description of Artificial Sequence: Synthetic epitope
PKSESMDYSR

SEQ ID NO: 32859 - protein, 10 aa, Artificial Sequence
  Description of Artificial Sequence: Synthetic epitope
PKSFYKAPQA

SEQ ID NO: 32860 - protein, 10 aa, Artificial Sequence
  Description of Artificial Sequence: Synthetic epitope
PKSGKHKNKE

SEQ ID NO: 32861 - protein, 10 aa, Artificial Sequence
  Description of Artificial Sequence: Synthetic epitope
PKSKFVSSRK

SEQ ID NO: 32862 - protein, 10 aa, Artificial Sequence
  Description of Artificial Sequence: Synthetic epitope
PKSKKVSDIK

SEQ ID NO: 32863 - protein, 10 aa, Artificial Sequence
  Description of Artificial Sequence: Synthetic epitope
PKSKSGISHY

SEQ ID NO: 32864 - protein, 10 aa, Artificial Sequence
  Description of Artificial Sequence: Synthetic epitope
PKSKVSSPIE

SEQ ID NO: 32865 - protein, 10 aa, Artificial Sequence
  Description of Artificial Sequence: Synthetic epitope
PKSLAVKKAK

SEQ ID NO: 32866 - protein, 10 aa, Artificial Sequence
  Description of Artificial Sequence: Synthetic epitope
PKSLKAKAEE

SEQ ID NO: 32867 - protein, 10 aa, Artificial Sequence
  Description of Artificial Sequence: Synthetic epitope
PKSLLVSSPS

SEQ ID NO: 32868 - protein, 10 aa, Artificial Sequence
  Description of Artificial Sequence: Synthetic epitope
PKSPKVTGTA

SEQ ID NO: 32869 - protein, 10 aa, Artificial Sequence
  Description of Artificial Sequence: Synthetic epitope
PKSPPKARRP

SEQ ID NO: 32870 - protein, 10 aa, Artificial Sequence
  Description of Artificial Sequence: Synthetic epitope
PKSQARRIRK

SEQ ID NO: 32871 - protein, 10 aa, Artificial Sequence
  Description of Artificial Sequence: Synthetic epitope
PKSRTSEEMG

SEQ ID NO: 32872 - protein, 10 aa, Artificial Sequence
  Description of Artificial Sequence: Synthetic epitope
PKSSASSTFT

SEQ ID NO: 32873 - protein, 10 aa, Artificial Sequence
  Description of Artificial Sequence: Synthetic epitope
PKSSDKSKSF

SEQ ID NO: 32874 - protein, 10 aa, Artificial Sequence
  Description of Artificial Sequence: Synthetic epitope
PKSSEKAIQP

SEQ ID NO: 32875 - protein, 10 aa, Artificial Sequence
  Description of Artificial Sequence: Synthetic epitope
PKSSLALGSS

SEQ ID NO: 32876 - protein, 10 aa, Artificial Sequence
  Description of Artificial Sequence: Synthetic epitope
PKSSMASTSR

SEQ ID NO: 32877 - protein, 10 aa, Artificial Sequence
  Description of Artificial Sequence: Synthetic epitope
PKSSPNKEKE

SEQ ID NO: 32878 - protein, 10 aa, Artificial Sequence
  Description of Artificial Sequence: Synthetic epitope
PKSTAMNESS

SEQ ID NO: 32879 - protein, 10 aa, Artificial Sequence
  Description of Artificial Sequence: Synthetic epitope
PKSTARSVVL

SEQ ID NO: 32880 - protein, 10 aa, Artificial Sequence
  Description of Artificial Sequence: Synthetic epitope
PKSVARIAKL

SEQ ID NO: 32881 - protein, 10 aa, Artificial Sequence
  Description of Artificial Sequence: Synthetic epitope
PKSVAVNAEE

SEQ ID NO: 32882 - protein, 10 aa, Artificial Sequence
  Description of Artificial Sequence: Synthetic epitope
PKSVGAITET

SEQ ID NO: 32883 - protein, 10 aa, Artificial Sequence
  Description of Artificial Sequence: Synthetic epitope
PKSVLIRQQI

SEQ ID NO: 32884 - protein, 10 aa, Artificial Sequence
  Description of Artificial Sequence: Synthetic epitope
PKSYRTAKFH

SEQ ID NO: 32885 - protein, 10 aa, Artificial Sequence
  Description of Artificial Sequence: Synthetic epitope
PKTDEVDNLA

SEQ ID NO: 32886 - protein, 10 aa, Artificial Sequence
  Description of Artificial Sequence: Synthetic epitope
PKTEAASDPQ

SEQ ID NO: 32887 - protein, 10 aa, Artificial Sequence
  Description of Artificial Sequence: Synthetic epitope
PKTEKEKGSS

SEQ ID NO: 32888 - protein, 10 aa, Artificial Sequence
  Description of Artificial Sequence: Synthetic epitope
PKTELQQAGA

SEQ ID NO: 32889 - protein, 10 aa, Artificial Sequence
  Description of Artificial Sequence: Synthetic epitope
PKTESDNGMM

SEQ ID NO: 32890 - protein, 10 aa, Artificial Sequence
  Description of Artificial Sequence: Synthetic epitope
PKTKDKSQGA

SEQ ID NO: 32891 - protein, 10 aa, Artificial Sequence
  Description of Artificial Sequence: Synthetic epitope
PKTKKVEKTV

SEQ ID NO: 32892 - protein, 10 aa, Artificial Sequence
  Description of Artificial Sequence: Synthetic epitope
PKTLIGLARS

SEQ ID NO: 32893 - protein, 10 aa, Artificial Sequence
  Description of Artificial Sequence: Synthetic epitope
PKTNKINKDH

SEQ ID NO: 32894 - protein, 10 aa, Artificial Sequence
  Description of Artificial Sequence: Synthetic epitope
PKTQDTEDDE

SEQ ID NO: 32895 - protein, 10 aa, Artificial Sequence
  Description of Artificial Sequence: Synthetic epitope
PKTQGTNQIQ

SEQ ID NO: 32896 - protein, 10 aa, Artificial Sequence
  Description of Artificial Sequence: Synthetic epitope
PKTSASTDSP

SEQ ID NO: 32897 - protein, 10 aa, Artificial Sequence
  Description of Artificial Sequence: Synthetic epitope
PKTSREQEIP

SEQ ID NO: 32898 - protein, 10 aa, Artificial Sequence
  Description of Artificial Sequence: Synthetic epitope
PKTSRKSVSQ

SEQ ID NO: 32899 - protein, 10 aa, Artificial Sequence
  Description of Artificial Sequence: Synthetic epitope
PKTTSVSQNT

SEQ ID NO: 32900 - protein, 10 aa, Artificial Sequence
  Description of Artificial Sequence: Synthetic epitope
PKTVSKEKKS

SEQ ID NO: 32901 - protein, 10 aa, Artificial Sequence
  Description of Artificial Sequence: Synthetic epitope
PKTVTQSLKK

SEQ ID NO: 32902 - protein, 10 aa, Artificial Sequence
  Description of Artificial Sequence: Synthetic epitope
PKVAKAEAEG

SEQ ID NO: 32903 - protein, 10 aa, Artificial Sequence
  Description of Artificial Sequence: Synthetic epitope
PKVERDQAAK

SEQ ID NO: 32904 - protein, 10 aa, Artificial Sequence
  Description of Artificial Sequence: Synthetic epitope
PKVESGNAKP

SEQ ID NO: 32905 - protein, 10 aa, Artificial Sequence
  Description of Artificial Sequence: Synthetic epitope
PKVKATAAPA

SEQ ID NO: 32906 - protein, 10 aa, Artificial Sequence
  Description of Artificial Sequence: Synthetic epitope
PKVLEVEDST

SEQ ID NO: 32907 - protein, 10 aa, Artificial Sequence
  Description of Artificial Sequence: Synthetic epitope
PKVLMRLSKT

SEQ ID NO: 32908 - protein, 10 aa, Artificial Sequence
  Description of Artificial Sequence: Synthetic epitope
PKVRAQSSKD

SEQ ID NO: 32909 - protein, 10 aa, Artificial Sequence
  Description of Artificial Sequence: Synthetic epitope
PKVSAISKTQ

SEQ ID NO: 32910 - protein, 10 aa, Artificial Sequence
  Description of Artificial Sequence: Synthetic epitope
PKVSKASHDP

SEQ ID NO: 32911 - protein, 10 aa, Artificial Sequence
  Description of Artificial Sequence: Synthetic epitope
PKVSKRATKK

SEQ ID NO: 32912 - protein, 10 aa, Artificial Sequence
  Description of Artificial Sequence: Synthetic epitope
PKVSRTQQLL

SEQ ID NO: 32913 - protein, 10 aa, Artificial Sequence
  Description of Artificial Sequence: Synthetic epitope
PKVSSKDTRE

SEQ ID NO: 32914 - protein, 10 aa, Artificial Sequence
  Description of Artificial Sequence: Synthetic epitope
PKVSSNQLNR

SEQ ID NO: 32915 - protein, 10 aa, Artificial Sequence
  Description of Artificial Sequence: Synthetic epitope
PKVSTKSLSK

SEQ ID NO: 32916 - protein, 10 aa, Artificial Sequence
  Description of Artificial Sequence: Synthetic epitope
PKVSTKSLSK

SEQ ID NO: 32917 - protein, 10 aa, Artificial Sequence
  Description of Artificial Sequence: Synthetic epitope
PKVSTRSITV

SEQ ID NO: 32918 - protein, 10 aa, Artificial Sequence
  Description of Artificial Sequence: Synthetic epitope
PKVTKTADKH

SEQ ID NO: 32919 - protein, 10 aa, Artificial Sequence
  Description of Artificial Sequence: Synthetic epitope
PKVTPSSAIS

SEQ ID NO: 32920 - protein, 10 aa, Artificial Sequence
  Description of Artificial Sequence: Synthetic epitope
PKVWHSEMTV

SEQ ID NO: 32921 - protein, 10 aa, Artificial Sequence
  Description of Artificial Sequence: Synthetic epitope
PKYERIMQKY

SEQ ID NO: 32922 - protein, 10 aa, Artificial Sequence
  Description of Artificial Sequence: Synthetic epitope
PKYGNAELME

SEQ ID NO: 32923 - protein, 10 aa, Artificial Sequence
  Description of Artificial Sequence: Synthetic epitope
PKYKNSSRGK

SEQ ID NO: 32924 - protein, 10 aa, Artificial Sequence
  Description of Artificial Sequence: Synthetic epitope
PKYPTAEREE

SEQ ID NO: 32925 - protein, 10 aa, Artificial Sequence
  Description of Artificial Sequence: Synthetic epitope
PKYRKIPQED

SEQ ID NO: 32926 - protein, 10 aa, Artificial Sequence
  Description of Artificial Sequence: Synthetic epitope
PLAAGVLPSQ

SEQ ID NO: 32927 - protein, 10 aa, Artificial Sequence
  Description of Artificial Sequence: Synthetic epitope
PLAASEASQP

SEQ ID NO: 32928 - protein, 10 aa, Artificial Sequence
  Description of Artificial Sequence: Synthetic epitope
PLAESVVKLT

SEQ ID NO: 32929 - protein, 10 aa, Artificial Sequence
  Description of Artificial Sequence: Synthetic epitope
PLAFSKEDEL

SEQ ID NO: 32930 - protein, 10 aa, Artificial Sequence
  Description of Artificial Sequence: Synthetic epitope
PLAGITMSHT

SEQ ID NO: 32931 - protein, 10 aa, Artificial Sequence
  Description of Artificial Sequence: Synthetic epitope
PLAGTSETIL

SEQ ID NO: 32932 - protein, 10 aa, Artificial Sequence
  Description of Artificial Sequence: Synthetic epitope
PLAIANAPGD

SEQ ID NO: 32933 - protein, 10 aa, Artificial Sequence
  Description of Artificial Sequence: Synthetic epitope
PLALAAEKDG

SEQ ID NO: 32934 - protein, 10 aa, Artificial Sequence
  Description of Artificial Sequence: Synthetic epitope
PLANTSSATG

SEQ ID NO: 32935 - protein, 10 aa, Artificial Sequence
  Description of Artificial Sequence: Synthetic epitope
PLARRLKAVR

SEQ ID NO: 32936 - protein, 10 aa, Artificial Sequence
  Description of Artificial Sequence: Synthetic epitope
PLASASISQK

SEQ ID NO: 32937 - protein, 10 aa, Artificial Sequence
  Description of Artificial Sequence: Synthetic epitope
PLASESTHED

SEQ ID NO: 32938 - protein, 10 aa, Artificial Sequence
  Description of Artificial Sequence: Synthetic epitope
PLASLKVRAH

SEQ ID NO: 32939 - protein, 10 aa, Artificial Sequence
  Description of Artificial Sequence: Synthetic epitope
PLASLKVRAH

SEQ ID NO: 32940 - protein, 10 aa, Artificial Sequence
  Description of Artificial Sequence: Synthetic epitope
PLASSFTALL

SEQ ID NO: 32941 - protein, 10 aa, Artificial Sequence
  Description of Artificial Sequence: Synthetic epitope
PLATLKNDQQ

SEQ ID NO: 32942 - protein, 10 aa, Artificial Sequence
  Description of Artificial Sequence: Synthetic epitope
PLATTDMKIA

SEQ ID NO: 32943 - protein, 10 aa, Artificial Sequence
  Description of Artificial Sequence: Synthetic epitope
PLAVAPQESH

SEQ ID NO: 32944 - protein, 10 aa, Artificial Sequence
  Description of Artificial Sequence: Synthetic epitope
PLAYSQETVS

SEQ ID NO: 32945 - protein, 10 aa, Artificial Sequence
  Description of Artificial Sequence: Synthetic epitope
PLDAILNARR

SEQ ID NO: 32946 - protein, 10 aa, Artificial Sequence
  Description of Artificial Sequence: Synthetic epitope
PLDAVIEAEH

SEQ ID NO: 32947 - protein, 10 aa, Artificial Sequence
  Description of Artificial Sequence: Synthetic epitope
PLDDASSGPI

SEQ ID NO: 32948 - protein, 10 aa, Artificial Sequence
  Description of Artificial Sequence: Synthetic epitope
PLDESAIVVK

SEQ ID NO: 32949 - protein, 10 aa, Artificial Sequence
  Description of Artificial Sequence: Synthetic epitope
PLDKTVVNKD

SEQ ID NO: 32950 - protein, 10 aa, Artificial Sequence
  Description of Artificial Sequence: Synthetic epitope
PLDLEQNSQG

SEQ ID NO: 32951 - protein, 10 aa, Artificial Sequence
  Description of Artificial Sequence: Synthetic epitope
PLDLKIKASM

SEQ ID NO: 32952 - protein, 10 aa, Artificial Sequence
  Description of Artificial Sequence: Synthetic epitope
PLDQVTLPQK

SEQ ID NO: 32953 - protein, 10 aa, Artificial Sequence
  Description of Artificial Sequence: Synthetic epitope
PLDSHVARWI

SEQ ID NO: 32954 - protein, 10 aa, Artificial Sequence
  Description of Artificial Sequence: Synthetic epitope
PLDSINNGSP

SEQ ID NO: 32955 - protein, 10 aa, Artificial Sequence
  Description of Artificial Sequence: Synthetic epitope
PLDVLKRAAT

SEQ ID NO: 32956 - protein, 10 aa, Artificial Sequence
  Description of Artificial Sequence: Synthetic epitope
PLEAITAFMD

SEQ ID NO: 32957 - protein, 10 aa, Artificial Sequence
  Description of Artificial Sequence: Synthetic epitope
PLEENVGNAA

SEQ ID NO: 32958 - protein, 10 aa, Artificial Sequence
  Description of Artificial Sequence: Synthetic epitope
PLEESAESSN

SEQ ID NO: 32959 - protein, 10 aa, Artificial Sequence
  Description of Artificial Sequence: Synthetic epitope
PLEESESQKK

SEQ ID NO: 32960 - protein, 10 aa, Artificial Sequence
  Description of Artificial Sequence: Synthetic epitope
PLEEVARVKE

SEQ ID NO: 32961 - protein, 10 aa, Artificial Sequence
  Description of Artificial Sequence: Synthetic epitope
PLEGSSVATP

SEQ ID NO: 32962 - protein, 10 aa, Artificial Sequence
  Description of Artificial Sequence: Synthetic epitope
PLEKNEKTSE

SEQ ID NO: 32963 - protein, 10 aa, Artificial Sequence
  Description of Artificial Sequence: Synthetic epitope
PLEKVDEEAT

SEQ ID NO: 32964 - protein, 10 aa, Artificial Sequence
  Description of Artificial Sequence: Synthetic epitope
PLELKSAPSK

SEQ ID NO: 32965 - protein, 10 aa, Artificial Sequence
  Description of Artificial Sequence: Synthetic epitope
PLEQEADLIE

SEQ ID NO: 32966 - protein, 10 aa, Artificial Sequence
  Description of Artificial Sequence: Synthetic epitope
PLEQVEALKK

SEQ ID NO: 32967 - protein, 10 aa, Artificial Sequence
  Description of Artificial Sequence: Synthetic epitope
PLESLIKDVD

SEQ ID NO: 32968 - protein, 10 aa, Artificial Sequence
  Description of Artificial Sequence: Synthetic epitope
PLESRQQMET

SEQ ID NO: 32969 - protein, 10 aa, Artificial Sequence
  Description of Artificial Sequence: Synthetic epitope
PLETRTRTSS

SEQ ID NO: 32970 - protein, 10 aa, Artificial Sequence
  Description of Artificial Sequence: Synthetic epitope
PLETTLGGSM

SEQ ID NO: 32971 - protein, 10 aa, Artificial Sequence
  Description of Artificial Sequence: Synthetic epitope
PLFATLMAYE

SEQ ID NO: 32972 - protein, 10 aa, Artificial Sequence
  Description of Artificial Sequence: Synthetic epitope
PLFFKLMTSS

SEQ ID NO: 32973 - protein, 10 aa, Artificial Sequence
  Description of Artificial Sequence: Synthetic epitope
PLFGSLKWNN

SEQ ID NO: 32974 - protein, 10 aa, Artificial Sequence
  Description of Artificial Sequence: Synthetic epitope
PLFTAALGAP

SEQ ID NO: 32975 - protein, 10 aa, Artificial Sequence
  Description of Artificial Sequence: Synthetic epitope
PLGAEGAKTG

SEQ ID NO: 32976 - protein, 10 aa, Artificial Sequence
  Description of Artificial Sequence: Synthetic epitope
PLGDAAENKA

SEQ ID NO: 32977 - protein, 10 aa, Artificial Sequence
  Description of Artificial Sequence: Synthetic epitope
PLGDTLTVSE

SEQ ID NO: 32978 - protein, 10 aa, Artificial Sequence
  Description of Artificial Sequence: Synthetic epitope
PLGKKSMKHR

SEQ ID NO: 32979 - protein, 10 aa, Artificial Sequence
  Description of Artificial Sequence: Synthetic epitope
PLGRQTSQQP

SEQ ID NO: 32980 - protein, 10 aa, Artificial Sequence
  Description of Artificial Sequence: Synthetic epitope
PLGSEAASQP

SEQ ID NO: 32981 - protein, 10 aa, Artificial Sequence
  Description of Artificial Sequence: Synthetic epitope
PLGSLTLGKS

SEQ ID NO: 32982 - protein, 10 aa, Artificial Sequence
  Description of Artificial Sequence: Synthetic epitope
PLGVTTSDTS

SEQ ID NO: 32983 - protein, 10 aa, Artificial Sequence
  Description of Artificial Sequence: Synthetic epitope
PLHESMALEH

SEQ ID NO: 32984 - protein, 10 aa, Artificial Sequence
  Description of Artificial Sequence: Synthetic epitope
PLHESMALEH

SEQ ID NO: 32985 - protein, 10 aa, Artificial Sequence
  Description of Artificial Sequence: Synthetic epitope
PLHIKTEQSF

SEQ ID NO: 32986 - protein, 10 aa, Artificial Sequence
  Description of Artificial Sequence: Synthetic epitope
PLHPASSQRP

SEQ ID NO: 32987 - protein, 10 aa, Artificial Sequence
  Description of Artificial Sequence: Synthetic epitope
PLHSKAEQHL

SEQ ID NO: 32988 - protein, 10 aa, Artificial Sequence
  Description of Artificial Sequence: Synthetic epitope
PLHVALEVAT

SEQ ID NO: 32989 - protein, 10 aa, Artificial Sequence
  Description of Artificial Sequence: Synthetic epitope
PLIKKATGVQ

SEQ ID NO: 32990 - protein, 10 aa, Artificial Sequence
  Description of Artificial Sequence: Synthetic epitope
PLINFKVSSA

SEQ ID NO: 32991 - protein, 10 aa, Artificial Sequence
  Description of Artificial Sequence: Synthetic epitope
PLIQAQAEAF

SEQ ID NO: 32992 - protein, 10 aa, Artificial Sequence
  Description of Artificial Sequence: Synthetic epitope
PLIREDVHKV

SEQ ID NO: 32993 - protein, 10 aa, Artificial Sequence
  Description of Artificial Sequence: Synthetic epitope
PLIRKTTASQ

SEQ ID NO: 32994 - protein, 10 aa, Artificial Sequence
  Description of Artificial Sequence: Synthetic epitope
PLISPDANID

SEQ ID NO: 32995 - protein, 10 aa, Artificial Sequence
  Description of Artificial Sequence: Synthetic epitope
PLIVDTVSAE

SEQ ID NO: 32996 - protein, 10 aa, Artificial Sequence
  Description of Artificial Sequence: Synthetic epitope
PLKASLSNAL

SEQ ID NO: 32997 - protein, 10 aa, Artificial Sequence
  Description of Artificial Sequence: Synthetic epitope
PLKGPKKNKH

SEQ ID NO: 32998 - protein, 10 aa, Artificial Sequence
  Description of Artificial Sequence: Synthetic epitope
PLKIETISHE

SEQ ID NO: 32999 - protein, 10 aa, Artificial Sequence
  Description of Artificial Sequence: Synthetic epitope
PLKLRSILDM

SEQ ID NO: 33000 - protein, 10 aa, Artificial Sequence
  Description of Artificial Sequence: Synthetic epitope
PLKNTKTNHS

SEQ ID NO: 33001 - protein, 10 aa, Artificial Sequence
  Description of Artificial Sequence: Synthetic epitope
PLKRDLVVAA

SEQ ID NO: 33002 - protein, 10 aa, Artificial Sequence
  Description of Artificial Sequence: Synthetic epitope
PLKSIAESRI

SEQ ID NO: 33003 - protein, 10 aa, Artificial Sequence
  Description of Artificial Sequence: Synthetic epitope
PLKSKVKQVD

SEQ ID NO: 33004 - protein, 10 aa, Artificial Sequence
  Description of Artificial Sequence: Synthetic epitope
PLKTARVEAT

SEQ ID NO: 33005 - protein, 10 aa, Artificial Sequence
  Description of Artificial Sequence: Synthetic epitope
PLKTGLLIAD

SEQ ID NO: 33006 - protein, 10 aa, Artificial Sequence
  Description of Artificial Sequence: Synthetic epitope
PLLARSNTSQ

SEQ ID NO: 33007 - protein, 10 aa, Artificial Sequence
  Description of Artificial Sequence: Synthetic epitope
PLLATESVKQ

SEQ ID NO: 33008 - protein, 10 aa, Artificial Sequence
  Description of Artificial Sequence: Synthetic epitope
PLLESLSLHS

SEQ ID NO: 33009 - protein, 10 aa, Artificial Sequence
  Description of Artificial Sequence: Synthetic epitope
PLLGILVQSR

SEQ ID NO: 33010 - protein, 10 aa, Artificial Sequence
  Description of Artificial Sequence: Synthetic epitope
PLLIEKVDSE

SEQ ID NO: 33011 - protein, 10 aa, Artificial Sequence
  Description of Artificial Sequence: Synthetic epitope
PLLILDKMSE

SEQ ID NO: 33012 - protein, 10 aa, Artificial Sequence
  Description of Artificial Sequence: Synthetic epitope
PLLKVLILQR

SEQ ID NO: 33013 - protein, 10 aa, Artificial Sequence
  Description of Artificial Sequence: Synthetic epitope
PLLKVSMSMR

SEQ ID NO: 33014 - protein, 10 aa, Artificial Sequence
  Description of Artificial Sequence: Synthetic epitope
PLLQEAQAAS

SEQ ID NO: 33015 - protein, 10 aa, Artificial Sequence
  Description of Artificial Sequence: Synthetic epitope
PLLRSATVRK

SEQ ID NO: 33016 - protein, 10 aa, Artificial Sequence
  Description of Artificial Sequence: Synthetic epitope
PLLSLKDFYD

SEQ ID NO: 33017 - protein, 10 aa, Artificial Sequence
  Description of Artificial Sequence: Synthetic epitope
PLLSNASATP

SEQ ID NO: 33018 - protein, 10 aa, Artificial Sequence
  Description of Artificial Sequence: Synthetic epitope
PLLSTSEYGV

SEQ ID NO: 33019 - protein, 10 aa, Artificial Sequence
  Description of Artificial Sequence: Synthetic epitope
PLLSTSMTSE

SEQ ID NO: 33020 - protein, 10 aa, Artificial Sequence
  Description of Artificial Sequence: Synthetic epitope
PLLTSTKDLV

SEQ ID NO: 33021 - protein, 10 aa, Artificial Sequence
  Description of Artificial Sequence: Synthetic epitope
PLLVSVLSDS

SEQ ID NO: 33022 - protein, 10 aa, Artificial Sequence
  Description of Artificial Sequence: Synthetic epitope
PLLWPMDAEP

SEQ ID NO: 33023 - protein, 10 aa, Artificial Sequence
  Description of Artificial Sequence: Synthetic epitope
PLMQTISHQH

SEQ ID NO: 33024 - protein, 10 aa, Artificial Sequence
  Description of Artificial Sequence: Synthetic epitope
PLMRKLGLMD

SEQ ID NO: 33025 - protein, 10 aa, Artificial Sequence
  Description of Artificial Sequence: Synthetic epitope
PLNAALQASM

SEQ ID NO: 33026 - protein, 10 aa, Artificial Sequence
  Description of Artificial Sequence: Synthetic epitope
PLNAQVIKKG

SEQ ID NO: 33027 - protein, 10 aa, Artificial Sequence
  Description of Artificial Sequence: Synthetic epitope
PLNIDLLNSP

SEQ ID NO: 33028 - protein, 10 aa, Artificial Sequence
  Description of Artificial Sequence: Synthetic epitope
PLNLDTKYEL

SEQ ID NO: 33029 - protein, 10 aa, Artificial Sequence
  Description of Artificial Sequence: Synthetic epitope
PLNQQDVPDK

SEQ ID NO: 33030 - protein, 10 aa, Artificial Sequence
  Description of Artificial Sequence: Synthetic epitope
PLNTSAEQSD

SEQ ID NO: 33031 - protein, 10 aa, Artificial Sequence
  Description of Artificial Sequence: Synthetic epitope
PLNTTEGQAT

SEQ ID NO: 33032 - protein, 10 aa, Artificial Sequence
  Description of Artificial Sequence: Synthetic epitope
PLNVTLAAEA

SEQ ID NO: 33033 - protein, 10 aa, Artificial Sequence
  Description of Artificial Sequence: Synthetic epitope
PLNVTSVTNG

SEQ ID NO: 33034 - protein, 10 aa, Artificial Sequence
  Description of Artificial Sequence: Synthetic epitope
PLPASAAKAG

SEQ ID NO: 33035 - protein, 10 aa, Artificial Sequence
  Description of Artificial Sequence: Synthetic epitope
PLPASLDTTD

SEQ ID NO: 33036 - protein, 10 aa, Artificial Sequence
  Description of Artificial Sequence: Synthetic epitope
PLPDYMSEEK

SEQ ID NO: 33037 - protein, 10 aa, Artificial Sequence
  Description of Artificial Sequence: Synthetic epitope
PLPQRFLLHV

SEQ ID NO: 33038 - protein, 10 aa, Artificial Sequence
  Description of Artificial Sequence: Synthetic epitope
PLPSKSEAIT

SEQ ID NO: 33039 - protein, 10 aa, Artificial Sequence
  Description of Artificial Sequence: Synthetic epitope
PLPSLAESRA

SEQ ID NO: 33040 - protein, 10 aa, Artificial Sequence
  Description of Artificial Sequence: Synthetic epitope
PLPTLKMQTT

SEQ ID NO: 33041 - protein, 10 aa, Artificial Sequence
  Description of Artificial Sequence: Synthetic epitope
PLPYTAQTNA

SEQ ID NO: 33042 - protein, 10 aa, Artificial Sequence
  Description of Artificial Sequence: Synthetic epitope
PLQDDSINQA

SEQ ID NO: 33043 - protein, 10 aa, Artificial Sequence
  Description of Artificial Sequence: Synthetic epitope
PLQDHNMYND

SEQ ID NO: 33044 - protein, 10 aa, Artificial Sequence
  Description of Artificial Sequence: Synthetic epitope
PLQGKSIVDN

SEQ ID NO: 33045 - protein, 10 aa, Artificial Sequence
  Description of Artificial Sequence: Synthetic epitope
PLQITDTQQG

SEQ ID NO: 33046 - protein, 10 aa, Artificial Sequence
  Description of Artificial Sequence: Synthetic epitope
PLQKPTSTRA

SEQ ID NO: 33047 - protein, 10 aa, Artificial Sequence
  Description of Artificial Sequence: Synthetic epitope
PLQLEQSSDP

SEQ ID NO: 33048 - protein, 10 aa, Artificial Sequence
  Description of Artificial Sequence: Synthetic epitope
PLQMAAEPIS

SEQ ID NO: 33049 - protein, 10 aa, Artificial Sequence
  Description of Artificial Sequence: Synthetic epitope
PLQNIDFTQR

SEQ ID NO: 33050 - protein, 10 aa, Artificial Sequence
  Description of Artificial Sequence: Synthetic epitope
PLQQSTLGKA

SEQ ID NO: 33051 - protein, 10 aa, Artificial Sequence
  Description of Artificial Sequence: Synthetic epitope
PLQSREKTSE

SEQ ID NO: 33052 - protein, 10 aa, Artificial Sequence
  Description of Artificial Sequence: Synthetic epitope
PLQTTSVGKT

SEQ ID NO: 33053 - protein, 10 aa, Artificial Sequence
  Description of Artificial Sequence: Synthetic epitope
PLQVGAELQS

SEQ ID NO: 33054 - protein, 10 aa, Artificial Sequence
  Description of Artificial Sequence: Synthetic epitope
PLQYSNAFDV

SEQ ID NO: 33055 - protein, 10 aa, Artificial Sequence
  Description of Artificial Sequence: Synthetic epitope
PLRATMAQNE

SEQ ID NO: 33056 - protein, 10 aa, Artificial Sequence
  Description of Artificial Sequence: Synthetic epitope
PLRDQLLTLN

SEQ ID NO: 33057 - protein, 10 aa, Artificial Sequence
  Description of Artificial Sequence: Synthetic epitope
PLRKASLRSS

SEQ ID NO: 33058 - protein, 10 aa, Artificial Sequence
  Description of Artificial Sequence: Synthetic epitope
PLRLIAAKNE

SEQ ID NO: 33059 - protein, 10 aa, Artificial Sequence
  Description of Artificial Sequence: Synthetic epitope
PLRLNNTSQK

SEQ ID NO: 33060 - protein, 10 aa, Artificial Sequence
  Description of Artificial Sequence: Synthetic epitope
PLRSVLEQTK

SEQ ID NO: 33061 - protein, 10 aa, Artificial Sequence
  Description of Artificial Sequence: Synthetic epitope
PLRTLLRSSE

SEQ ID NO: 33062 - protein, 10 aa, Artificial Sequence
  Description of Artificial Sequence: Synthetic epitope
PLRVTELVQQ

SEQ ID NO: 33063 - protein, 10 aa, Artificial Sequence
  Description of Artificial Sequence: Synthetic epitope
PLSAEALAKP

SEQ ID NO: 33064 - protein, 10 aa, Artificial Sequence
  Description of Artificial Sequence: Synthetic epitope
PLSAEAQAQQ

SEQ ID NO: 33065 - protein, 10 aa, Artificial Sequence
  Description of Artificial Sequence: Synthetic epitope
PLSALNLAAG

SEQ ID NO: 33066 - protein, 10 aa, Artificial Sequence
  Description of Artificial Sequence: Synthetic epitope
PLSANMSQGG

SEQ ID NO: 33067 - protein, 10 aa, Artificial Sequence
  Description of Artificial Sequence: Synthetic epitope
PLSARALRRL

SEQ ID NO: 33068 - protein, 10 aa, Artificial Sequence
  Description of Artificial Sequence: Synthetic epitope
PLSASKTKTK

SEQ ID NO: 33069 - protein, 10 aa, Artificial Sequence
  Description of Artificial Sequence: Synthetic epitope
PLSEALLRRE

SEQ ID NO: 33070 - protein, 10 aa, Artificial Sequence
  Description of Artificial Sequence: Synthetic epitope
PLSEANEGPS

SEQ ID NO: 33071 - protein, 10 aa, Artificial Sequence
  Description of Artificial Sequence: Synthetic epitope
PLSEASSPLA

SEQ ID NO: 33072 - protein, 10 aa, Artificial Sequence
  Description of Artificial Sequence: Synthetic epitope
PLSEELISEM

SEQ ID NO: 33073 - protein, 10 aa, Artificial Sequence
  Description of Artificial Sequence: Synthetic epitope
PLSETLISKM

SEQ ID NO: 33074 - protein, 10 aa, Artificial Sequence
  Description of Artificial Sequence: Synthetic epitope
PLSGNDTDSL

SEQ ID NO: 33075 - protein, 10 aa, Artificial Sequence
  Description of Artificial Sequence: Synthetic epitope
PLSKAKTEQE

SEQ ID NO: 33076 - protein, 10 aa, Artificial Sequence
  Description of Artificial Sequence: Synthetic epitope
PLSKAQTVAA

SEQ ID NO: 33077 - protein, 10 aa, Artificial Sequence
  Description of Artificial Sequence: Synthetic epitope
PLSKIKFTGK

SEQ ID NO: 33078 - protein, 10 aa, Artificial Sequence
  Description of Artificial Sequence: Synthetic epitope
PLSKKLTSEE

SEQ ID NO: 33079 - protein, 10 aa, Artificial Sequence
  Description of Artificial Sequence: Synthetic epitope
PLSLSRTFVV

SEQ ID NO: 33080 - protein, 10 aa, Artificial Sequence
  Description of Artificial Sequence: Synthetic epitope
PLSMILLSDK

SEQ ID NO: 33081 - protein, 10 aa, Artificial Sequence
  Description of Artificial Sequence: Synthetic epitope
PLSNAVQLPI

SEQ ID NO: 33082 - protein, 10 aa, Artificial Sequence
  Description of Artificial Sequence: Synthetic epitope
PLSPHNITPE

SEQ ID NO: 33083 - protein, 10 aa, Artificial Sequence
  Description of Artificial Sequence: Synthetic epitope
PLSQASRYIG

SEQ ID NO: 33084 - protein, 10 aa, Artificial Sequence
  Description of Artificial Sequence: Synthetic epitope
PLSQPIQIAQ

SEQ ID NO: 33085 - protein, 10 aa, Artificial Sequence
  Description of Artificial Sequence: Synthetic epitope
PLSSGEASST

SEQ ID NO: 33086 - protein, 10 aa, Artificial Sequence
  Description of Artificial Sequence: Synthetic epitope
PLSSIVEIKK

SEQ ID NO: 33087 - protein, 10 aa, Artificial Sequence
  Description of Artificial Sequence: Synthetic epitope
PLSSNTLHQV

SEQ ID NO: 33088 - protein, 10 aa, Artificial Sequence
  Description of Artificial Sequence: Synthetic epitope
PLSSQVKPGS

SEQ ID NO: 33089 - protein, 10 aa, Artificial Sequence
  Description of Artificial Sequence: Synthetic epitope
PLSSTAKKMF

SEQ ID NO: 33090 - protein, 10 aa, Artificial Sequence
  Description of Artificial Sequence: Synthetic epitope
PLSTKLLVPS

SEQ ID NO: 33091 - protein, 10 aa, Artificial Sequence
  Description of Artificial Sequence: Synthetic epitope
PLSTSQTTSL

SEQ ID NO: 33092 - protein, 10 aa, Artificial Sequence
  Description of Artificial Sequence: Synthetic epitope
PLSTSSFDEQ

SEQ ID NO: 33093 - protein, 10 aa, Artificial Sequence
  Description of Artificial Sequence: Synthetic epitope
PLSVASVSSL

SEQ ID NO: 33094 - protein, 10 aa, Artificial Sequence
  Description of Artificial Sequence: Synthetic epitope
PLSVFTKEST

SEQ ID NO: 33095 - protein, 10 aa, Artificial Sequence
  Description of Artificial Sequence: Synthetic epitope
PLSVTNQNVT

SEQ ID NO: 33096 - protein, 10 aa, Artificial Sequence
  Description of Artificial Sequence: Synthetic epitope
PLTAAQLFSE

SEQ ID NO: 33097 - protein, 10 aa, Artificial Sequence
  Description of Artificial Sequence: Synthetic epitope
PLTAEIQQKI

SEQ ID NO: 33098 - protein, 10 aa, Artificial Sequence
  Description of Artificial Sequence: Synthetic epitope
PLTAVEKGAL

SEQ ID NO: 33099 - protein, 10 aa, Artificial Sequence
  Description of Artificial Sequence: Synthetic epitope
PLTGLNTQTQ

SEQ ID NO: 33100 - protein, 10 aa, Artificial Sequence
  Description of Artificial Sequence: Synthetic epitope
PLTIASVDKQ

SEQ ID NO: 33101 - protein, 10 aa, Artificial Sequence
  Description of Artificial Sequence: Synthetic epitope
PLTKTHSQAA

SEQ ID NO: 33102 - protein, 10 aa, Artificial Sequence
  Description of Artificial Sequence: Synthetic epitope
PLTMGNYVFP

SEQ ID NO: 33103 - protein, 10 aa, Artificial Sequence
  Description of Artificial Sequence: Synthetic epitope
PLTMSLKPQQ

SEQ ID NO: 33104 - protein, 10 aa, Artificial Sequence
  Description of Artificial Sequence: Synthetic epitope
PLTRSSGSSL

SEQ ID NO: 33105 - protein, 10 aa, Artificial Sequence
  Description of Artificial Sequence: Synthetic epitope
PLTSQALESN

SEQ ID NO: 33106 - protein, 10 aa, Artificial Sequence
  Description of Artificial Sequence: Synthetic epitope
PLTTNEKADT

SEQ ID NO: 33107 - protein, 10 aa, Artificial Sequence
  Description of Artificial Sequence: Synthetic epitope
PLTVILQSSV

SEQ ID NO: 33108 - protein, 10 aa, Artificial Sequence
  Description of Artificial Sequence: Synthetic epitope
PLTVRLHTQS

SEQ ID NO: 33109 - protein, 10 aa, Artificial Sequence
  Description of Artificial Sequence: Synthetic epitope
PLTVRRMMDV

SEQ ID NO: 33110 - protein, 10 aa, Artificial Sequence
  Description of Artificial Sequence: Synthetic epitope
PLVASASVSI

SEQ ID NO: 33111 - protein, 10 aa, Artificial Sequence
  Description of Artificial Sequence: Synthetic epitope
PLVASNKRSI

SEQ ID NO: 33112 - protein, 10 aa, Artificial Sequence
  Description of Artificial Sequence: Synthetic epitope
PLVMRTTNLD

SEQ ID NO: 33113 - protein, 10 aa, Artificial Sequence
  Description of Artificial Sequence: Synthetic epitope
PLVRSLISSN

SEQ ID NO: 33114 - protein, 10 aa, Artificial Sequence
  Description of Artificial Sequence: Synthetic epitope
PLVSASAVNE

SEQ ID NO: 33115 - protein, 10 aa, Artificial Sequence
  Description of Artificial Sequence: Synthetic epitope
PLVSKAQLSQ

SEQ ID NO: 33116 - protein, 10 aa, Artificial Sequence
  Description of Artificial Sequence: Synthetic epitope
PLVSKISEKR

SEQ ID NO: 33117 - protein, 10 aa, Artificial Sequence
  Description of Artificial Sequence: Synthetic epitope
PLVSVSTTRE

SEQ ID NO: 33118 - protein, 10 aa, Artificial Sequence
  Description of Artificial Sequence: Synthetic epitope
PLVTDDPTQV

SEQ ID NO: 33119 - protein, 10 aa, Artificial Sequence
  Description of Artificial Sequence: Synthetic epitope
PLVTKAGAIL

SEQ ID NO: 33120 - protein, 10 aa, Artificial Sequence
  Description of Artificial Sequence: Synthetic epitope
PLVTNVVLEE

SEQ ID NO: 33121 - protein, 10 aa, Artificial Sequence
  Description of Artificial Sequence: Synthetic epitope
PLVTNVVLEE

SEQ ID NO: 33122 - protein, 10 aa, Artificial Sequence
  Description of Artificial Sequence: Synthetic epitope
PLWDTSLRAP

SEQ ID NO: 33123 - protein, 10 aa, Artificial Sequence
  Description of Artificial Sequence: Synthetic epitope
PLYEPAKMKT

SEQ ID NO: 33124 - protein, 10 aa, Artificial Sequence
  Description of Artificial Sequence: Synthetic epitope
PLYHGFKEVE

SEQ ID NO: 33125 - protein, 10 aa, Artificial Sequence
  Description of Artificial Sequence: Synthetic epitope
PLYLKQSDLA

SEQ ID NO: 33126 - protein, 10 aa, Artificial Sequence
  Description of Artificial Sequence: Synthetic epitope
PLYQHQATRV

SEQ ID NO: 33127 - protein, 10 aa, Artificial Sequence
  Description of Artificial Sequence: Synthetic epitope
PLYQKSVWTQ

SEQ ID NO: 33128 - protein, 10 aa, Artificial Sequence
  Description of Artificial Sequence: Synthetic epitope
PLYRSNTSQL

SEQ ID NO: 33129 - protein, 10 aa, Artificial Sequence
  Description of Artificial Sequence: Synthetic epitope
PLYSMIMDKN

SEQ ID NO: 33130 - protein, 10 aa, Artificial Sequence
  Description of Artificial Sequence: Synthetic epitope
PLYSSVEFSN

SEQ ID NO: 33131 - protein, 10 aa, Artificial Sequence
  Description of Artificial Sequence: Synthetic epitope
PMAAVKQALR

SEQ ID NO: 33132 - protein, 10 aa, Artificial Sequence
  Description of Artificial Sequence: Synthetic epitope
PMADYVQEGP

SEQ ID NO: 33133 - protein, 10 aa, Artificial Sequence
  Description of Artificial Sequence: Synthetic epitope
PMAHEIPTVL

SEQ ID NO: 33134 - protein, 10 aa, Artificial Sequence
  Description of Artificial Sequence: Synthetic epitope
PMAMEPPAMD

SEQ ID NO: 33135 - protein, 10 aa, Artificial Sequence
  Description of Artificial Sequence: Synthetic epitope
PMAQKEAVIK

SEQ ID NO: 33136 - protein, 10 aa, Artificial Sequence
  Description of Artificial Sequence: Synthetic epitope
PMAVAGANQY

SEQ ID NO: 33137 - protein, 10 aa, Artificial Sequence
  Description of Artificial Sequence: Synthetic epitope
PMDAALNKEE

SEQ ID NO: 33138 - protein, 10 aa, Artificial Sequence
  Description of Artificial Sequence: Synthetic epitope
PMDEEASQES

SEQ ID NO: 33139 - protein, 10 aa, Artificial Sequence
  Description of Artificial Sequence: Synthetic epitope
PMDIMEQQPF

SEQ ID NO: 33140 - protein, 10 aa, Artificial Sequence
  Description of Artificial Sequence: Synthetic epitope
PMDISALSSP

SEQ ID NO: 33141 - protein, 10 aa, Artificial Sequence
  Description of Artificial Sequence: Synthetic epitope
PMDMYDRSLD

SEQ ID NO: 33142 - protein, 10 aa, Artificial Sequence
  Description of Artificial Sequence: Synthetic epitope
PMDQFAVHLM

SEQ ID NO: 33143 - protein, 10 aa, Artificial Sequence
  Description of Artificial Sequence: Synthetic epitope
PMDSKASVSK

SEQ ID NO: 33144 - protein, 10 aa, Artificial Sequence
  Description of Artificial Sequence: Synthetic epitope
PMDVLNEWTA

SEQ ID NO: 33145 - protein, 10 aa, Artificial Sequence
  Description of Artificial Sequence: Synthetic epitope
PMEDLGAKGA

SEQ ID NO: 33146 - protein, 10 aa, Artificial Sequence
  Description of Artificial Sequence: Synthetic epitope
PMEKISLSKS

SEQ ID NO: 33147 - protein, 10 aa, Artificial Sequence
  Description of Artificial Sequence: Synthetic epitope
PMEPSQYVSV

SEQ ID NO: 33148 - protein, 10 aa, Artificial Sequence
  Description of Artificial Sequence: Synthetic epitope
PMEQTSTSEG

SEQ ID NO: 33149 - protein, 10 aa, Artificial Sequence
  Description of Artificial Sequence: Synthetic epitope
PMERSSNQEG

SEQ ID NO: 33150 - protein, 10 aa, Artificial Sequence
  Description of Artificial Sequence: Synthetic epitope
PMETLSSEES

SEQ ID NO: 33151 - protein, 10 aa, Artificial Sequence
  Description of Artificial Sequence: Synthetic epitope
PMGEIYEWMR

SEQ ID NO: 33152 - protein, 10 aa, Artificial Sequence
  Description of Artificial Sequence: Synthetic epitope
PMGKAQEVSI

SEQ ID NO: 33153 - protein, 10 aa, Artificial Sequence
  Description of Artificial Sequence: Synthetic epitope
PMGLLASSVN

SEQ ID NO: 33154 - protein, 10 aa, Artificial Sequence
  Description of Artificial Sequence: Synthetic epitope
PMGMMQFNDI

SEQ ID NO: 33155 - protein, 10 aa, Artificial Sequence
  Description of Artificial Sequence: Synthetic epitope
PMGSKARKAK

SEQ ID NO: 33156 - protein, 10 aa, Artificial Sequence
  Description of Artificial Sequence: Synthetic epitope
PMIAPFSSKQ

SEQ ID NO: 33157 - protein, 10 aa, Artificial Sequence
  Description of Artificial Sequence: Synthetic epitope
PMIIRKVAKQ

SEQ ID NO: 33158 - protein, 10 aa, Artificial Sequence
  Description of Artificial Sequence: Synthetic epitope
PMIKPKGDKQ

SEQ ID NO: 33159 - protein, 10 aa, Artificial Sequence
  Description of Artificial Sequence: Synthetic epitope
PMIMENIQEL

SEQ ID NO: 33160 - protein, 10 aa, Artificial Sequence
  Description of Artificial Sequence: Synthetic epitope
PMIMKQSQSE

SEQ ID NO: 33161 - protein, 10 aa, Artificial Sequence
  Description of Artificial Sequence: Synthetic epitope
PMKHQSGQQR

SEQ ID NO: 33162 - protein, 10 aa, Artificial Sequence
  Description of Artificial Sequence: Synthetic epitope
PMKKFTTSIT

SEQ ID NO: 33163 - protein, 10 aa, Artificial Sequence
  Description of Artificial Sequence: Synthetic epitope
PMKLVSLEEA

SEQ ID NO: 33164 - protein, 10 aa, Artificial Sequence
  Description of Artificial Sequence: Synthetic epitope
PMKPLEIKTQ

SEQ ID NO: 33165 - protein, 10 aa, Artificial Sequence
  Description of Artificial Sequence: Synthetic epitope
PMKPPDEAKV

SEQ ID NO: 33166 - protein, 10 aa, Artificial Sequence
  Description of Artificial Sequence: Synthetic epitope
PMKSSKTDLQ

SEQ ID NO: 33167 - protein, 10 aa, Artificial Sequence
  Description of Artificial Sequence: Synthetic epitope
PMKVKKTGSQ

SEQ ID NO: 33168 - protein, 10 aa, Artificial Sequence
  Description of Artificial Sequence: Synthetic epitope
PMLKSMKNKN

SEQ ID NO: 33169 - protein, 10 aa, Artificial Sequence
  Description of Artificial Sequence: Synthetic epitope
PMLLVLKISR

SEQ ID NO: 33170 - protein, 10 aa, Artificial Sequence
  Description of Artificial Sequence: Synthetic epitope
PMLNTEVVQV

SEQ ID NO: 33171 - protein, 10 aa, Artificial Sequence
  Description of Artificial Sequence: Synthetic epitope
PMLQAKMDEI

SEQ ID NO: 33172 - protein, 10 aa, Artificial Sequence
  Description of Artificial Sequence: Synthetic epitope
PMLQAVAKNR

SEQ ID NO: 33173 - protein, 10 aa, Artificial Sequence
  Description of Artificial Sequence: Synthetic epitope
PMLQTVAKNK

SEQ ID NO: 33174 - protein, 10 aa, Artificial Sequence
  Description of Artificial Sequence: Synthetic epitope
PMLRDLTQNT

SEQ ID NO: 33175 - protein, 10 aa, Artificial Sequence
  Description of Artificial Sequence: Synthetic epitope
PMLSAIQKSL

SEQ ID NO: 33176 - protein, 10 aa, Artificial Sequence
  Description of Artificial Sequence: Synthetic epitope
PMLSTADKSS

SEQ ID NO: 33177 - protein, 10 aa, Artificial Sequence
  Description of Artificial Sequence: Synthetic epitope
PMMEIITAEQ

SEQ ID NO: 33178 - protein, 10 aa, Artificial Sequence
  Description of Artificial Sequence: Synthetic epitope
PMMIKNVLHS

SEQ ID NO: 33179 - protein, 10 aa, Artificial Sequence
  Description of Artificial Sequence: Synthetic epitope
PMMQQSQANP

SEQ ID NO: 33180 - protein, 10 aa, Artificial Sequence
  Description of Artificial Sequence: Synthetic epitope
PMNQRGETNK

SEQ ID NO: 33181 - protein, 10 aa, Artificial Sequence
  Description of Artificial Sequence: Synthetic epitope
PMNYIPVTPS

SEQ ID NO: 33182 - protein, 10 aa, Artificial Sequence
  Description of Artificial Sequence: Synthetic epitope
PMPDSSHDVK

SEQ ID NO: 33183 - protein, 10 aa, Artificial Sequence
  Description of Artificial Sequence: Synthetic epitope
PMPHAEYEVT

SEQ ID NO: 33184 - protein, 10 aa, Artificial Sequence
  Description of Artificial Sequence: Synthetic epitope
PMPNEKNDAE

SEQ ID NO: 33185 - protein, 10 aa, Artificial Sequence
  Description of Artificial Sequence: Synthetic epitope
PMPSMNSAAQ

SEQ ID NO: 33186 - protein, 10 aa, Artificial Sequence
  Description of Artificial Sequence: Synthetic epitope
PMQMYVLDIK

SEQ ID NO: 33187 - protein, 10 aa, Artificial Sequence
  Description of Artificial Sequence: Synthetic epitope
PMQSAAVAEP

SEQ ID NO: 33188 - protein, 10 aa, Artificial Sequence
  Description of Artificial Sequence: Synthetic epitope
PMQTPTSSPP

SEQ ID NO: 33189 - protein, 10 aa, Artificial Sequence
  Description of Artificial Sequence: Synthetic epitope
PMRAANRSHS

SEQ ID NO: 33190 - protein, 10 aa, Artificial Sequence
  Description of Artificial Sequence: Synthetic epitope
PMREFEIIWV

SEQ ID NO: 33191 - protein, 10 aa, Artificial Sequence
  Description of Artificial Sequence: Synthetic epitope
PMRNKASKRK

SEQ ID NO: 33192 - protein, 10 aa, Artificial Sequence
  Description of Artificial Sequence: Synthetic epitope
PMRSEPLRKK

SEQ ID NO: 33193 - protein, 10 aa, Artificial Sequence
  Description of Artificial Sequence: Synthetic epitope
PMSASQSNKG

SEQ ID NO: 33194 - protein, 10 aa, Artificial Sequence
  Description of Artificial Sequence: Synthetic epitope
PMSEALSIAQ

SEQ ID NO: 33195 - protein, 10 aa, Artificial Sequence
  Description of Artificial Sequence: Synthetic epitope
PMSQAPLRKT

SEQ ID NO: 33196 - protein, 10 aa, Artificial Sequence
  Description of Artificial Sequence: Synthetic epitope
PMSSQLAANH

SEQ ID NO: 33197 - protein, 10 aa, Artificial Sequence
  Description of Artificial Sequence: Synthetic epitope
PMSTTVAGSQ

SEQ ID NO: 33198 - protein, 10 aa, Artificial Sequence
  Description of Artificial Sequence: Synthetic epitope
PMTKKSAAPT

SEQ ID NO: 33199 - protein, 10 aa, Artificial Sequence
  Description of Artificial Sequence: Synthetic epitope
PMVMSGLSQG

SEQ ID NO: 33200 - protein, 10 aa, Artificial Sequence
  Description of Artificial Sequence: Synthetic epitope
PMVQSEGQVA

SEQ ID NO: 33201 - protein, 10 aa, Artificial Sequence
  Description of Artificial Sequence: Synthetic epitope
PMVVAATTDS

SEQ ID NO: 33202 - protein, 10 aa, Artificial Sequence
  Description of Artificial Sequence: Synthetic epitope
PMYDASQALK

SEQ ID NO: 33203 - protein, 10 aa, Artificial Sequence
  Description of Artificial Sequence: Synthetic epitope
PMYNEYLDRI

SEQ ID NO: 33204 - protein, 10 aa, Artificial Sequence
  Description of Artificial Sequence: Synthetic epitope
PNADSKKRIR

SEQ ID NO: 33205 - protein, 10 aa, Artificial Sequence
  Description of Artificial Sequence: Synthetic epitope
PNAFAVEKQM

SEQ ID NO: 33206 - protein, 10 aa, Artificial Sequence
  Description of Artificial Sequence: Synthetic epitope
PNAGKAAERK

SEQ ID NO: 33207 - protein, 10 aa, Artificial Sequence
  Description of Artificial Sequence: Synthetic epitope
PNAMATIQSN

SEQ ID NO: 33208 - protein, 10 aa, Artificial Sequence
  Description of Artificial Sequence: Synthetic epitope
PNANVQELER

SEQ ID NO: 33209 - protein, 10 aa, Artificial Sequence
  Description of Artificial Sequence: Synthetic epitope
PNASSEAVQL

SEQ ID NO: 33210 - protein, 10 aa, Artificial Sequence
  Description of Artificial Sequence: Synthetic epitope
PNASSGFMKT

SEQ ID NO: 33211 - protein, 10 aa, Artificial Sequence
  Description of Artificial Sequence: Synthetic epitope
PNAVKALNEM

SEQ ID NO: 33212 - protein, 10 aa, Artificial Sequence
  Description of Artificial Sequence: Synthetic epitope
PNDQMKQQTR

SEQ ID NO: 33213 - protein, 10 aa, Artificial Sequence
  Description of Artificial Sequence: Synthetic epitope
PNDTNREYKS

SEQ ID NO: 33214 - protein, 10 aa, Artificial Sequence
  Description of Artificial Sequence: Synthetic epitope
PNEDQNENNE

SEQ ID NO: 33215 - protein, 10 aa, Artificial Sequence
  Description of Artificial Sequence: Synthetic epitope
PNEDVKEKRE

SEQ ID NO: 33216 - protein, 10 aa, Artificial Sequence
  Description of Artificial Sequence: Synthetic epitope
PNEEGYWQIA

SEQ ID NO: 33217 - protein, 10 aa, Artificial Sequence
  Description of Artificial Sequence: Synthetic epitope
PNELESVYSG

SEQ ID NO: 33218 - protein, 10 aa, Artificial Sequence
  Description of Artificial Sequence: Synthetic epitope
PNELETASLG

SEQ ID NO: 33219 - protein, 10 aa, Artificial Sequence
  Description of Artificial Sequence: Synthetic epitope
PNEMKNMQPG

SEQ ID NO: 33220 - protein, 10 aa, Artificial Sequence
  Description of Artificial Sequence: Synthetic epitope
PNENVLRSDD

SEQ ID NO: 33221 - protein, 10 aa, Artificial Sequence
  Description of Artificial Sequence: Synthetic epitope
PNEPAKMNFS

SEQ ID NO: 33222 - protein, 10 aa, Artificial Sequence
  Description of Artificial Sequence: Synthetic epitope
PNESSLSIFS

SEQ ID NO: 33223 - protein, 10 aa, Artificial Sequence
  Description of Artificial Sequence: Synthetic epitope
PNETSVQANG

SEQ ID NO: 33224 - protein, 10 aa, Artificial Sequence
  Description of Artificial Sequence: Synthetic epitope
PNEVKVNQKQ

SEQ ID NO: 33225 - protein, 10 aa, Artificial Sequence
  Description of Artificial Sequence: Synthetic epitope
PNFGRTQSSD

SEQ ID NO: 33226 - protein, 10 aa, Artificial Sequence
  Description of Artificial Sequence: Synthetic epitope
PNFQALSGNE

SEQ ID NO: 33227 - protein, 10 aa, Artificial Sequence
  Description of Artificial Sequence: Synthetic epitope
PNFRQVQGGL

SEQ ID NO: 33228 - protein, 10 aa, Artificial Sequence
  Description of Artificial Sequence: Synthetic epitope
PNFVTHIHSR

SEQ ID NO: 33229 - protein, 10 aa, Artificial Sequence
  Description of Artificial Sequence: Synthetic epitope
PNGALQLASP

SEQ ID NO: 33230 - protein, 10 aa, Artificial Sequence
  Description of Artificial Sequence: Synthetic epitope
PNGEAAKSPP

SEQ ID NO: 33231 - protein, 10 aa, Artificial Sequence
  Description of Artificial Sequence: Synthetic epitope
PNGKTRTSLK

SEQ ID NO: 33232 - protein, 10 aa, Artificial Sequence
  Description of Artificial Sequence: Synthetic epitope
PNGSKSKYKP

SEQ ID NO: 33233 - protein, 10 aa, Artificial Sequence
  Description of Artificial Sequence: Synthetic epitope
PNHKLKTVGE

SEQ ID NO: 33234 - protein, 10 aa, Artificial Sequence
  Description of Artificial Sequence: Synthetic epitope
PNHSETISHT

SEQ ID NO: 33235 - protein, 10 aa, Artificial Sequence
  Description of Artificial Sequence: Synthetic epitope
PNHVVSLTNN

SEQ ID NO: 33236 - protein, 10 aa, Artificial Sequence
  Description of Artificial Sequence: Synthetic epitope
PNIAKFSTPP

SEQ ID NO: 33237 - protein, 10 aa, Artificial Sequence
  Description of Artificial Sequence: Synthetic epitope
PNIGIKRAWD

SEQ ID NO: 33238 - protein, 10 aa, Artificial Sequence
  Description of Artificial Sequence: Synthetic epitope
PNIGKRLNAL

SEQ ID NO: 33239 - protein, 10 aa, Artificial Sequence
  Description of Artificial Sequence: Synthetic epitope
PNIIKRSKSS

SEQ ID NO: 33240 - protein, 10 aa, Artificial Sequence
  Description of Artificial Sequence: Synthetic epitope
PNILARAGSL

SEQ ID NO: 33241 - protein, 10 aa, Artificial Sequence
  Description of Artificial Sequence: Synthetic epitope
PNINTRMFQP

SEQ ID NO: 33242 - protein, 10 aa, Artificial Sequence
  Description of Artificial Sequence: Synthetic epitope
PNISLDVLQP

SEQ ID NO: 33243 - protein, 10 aa, Artificial Sequence
  Description of Artificial Sequence: Synthetic epitope
PNIVGSEHYD

SEQ ID NO: 33244 - protein, 10 aa, Artificial Sequence
  Description of Artificial Sequence: Synthetic epitope
PNIVKALHKQ

SEQ ID NO: 33245 - protein, 10 aa, Artificial Sequence
  Description of Artificial Sequence: Synthetic epitope
PNKAGFRWEH

SEQ ID NO: 33246 - protein, 10 aa, Artificial Sequence
  Description of Artificial Sequence: Synthetic epitope
PNKEKTEAKR

SEQ ID NO: 33247 - protein, 10 aa, Artificial Sequence
  Description of Artificial Sequence: Synthetic epitope
PNKGVIGDPL

SEQ ID NO: 33248 - protein, 10 aa, Artificial Sequence
  Description of Artificial Sequence: Synthetic epitope
PNKIEDAQGN

SEQ ID NO: 33249 - protein, 10 aa, Artificial Sequence
  Description of Artificial Sequence: Synthetic epitope
PNKMIRKGVF

SEQ ID NO: 33250 - protein, 10 aa, Artificial Sequence
  Description of Artificial Sequence: Synthetic epitope
PNKQIAESAN

SEQ ID NO: 33251 - protein, 10 aa, Artificial Sequence
  Description of Artificial Sequence: Synthetic epitope
PNKRAEVDEE

SEQ ID NO: 33252 - protein, 10 aa, Artificial Sequence
  Description of Artificial Sequence: Synthetic epitope
PNKSSISETL

SEQ ID NO: 33253 - protein, 10 aa, Artificial Sequence
  Description of Artificial Sequence: Synthetic epitope
PNKTMISLSI

SEQ ID NO: 33254 - protein, 10 aa, Artificial Sequence
  Description of Artificial Sequence: Synthetic epitope
PNKVSETSRT

SEQ ID NO: 33255 - protein, 10 aa, Artificial Sequence
  Description of Artificial Sequence: Synthetic epitope
PNKVSETSRT

SEQ ID NO: 33256 - protein, 10 aa, Artificial Sequence
  Description of Artificial Sequence: Synthetic epitope
PNKYEFQYVQ

SEQ ID NO: 33257 - protein, 10 aa, Artificial Sequence
  Description of Artificial Sequence: Synthetic epitope
PNLAVASERR

SEQ ID NO: 33258 - protein, 10 aa, Artificial Sequence
  Description of Artificial Sequence: Synthetic epitope
PNLFSEAQYQ

SEQ ID NO: 33259 - protein, 10 aa, Artificial Sequence
  Description of Artificial Sequence: Synthetic epitope
PNLGIRQAMT

SEQ ID NO: 33260 - protein, 10 aa, Artificial Sequence
  Description of Artificial Sequence: Synthetic epitope
PNLGKLNTNQ

SEQ ID NO: 33261 - protein, 10 aa, Artificial Sequence
  Description of Artificial Sequence: Synthetic epitope
PNLHAIEMDS

SEQ ID NO: 33262 - protein, 10 aa, Artificial Sequence
  Description of Artificial Sequence: Synthetic epitope
PNLKTVQPVL

SEQ ID NO: 33263 - protein, 10 aa, Artificial Sequence
  Description of Artificial Sequence: Synthetic epitope
PNLQWHAGRT

SEQ ID NO: 33264 - protein, 10 aa, Artificial Sequence
  Description of Artificial Sequence: Synthetic epitope
PNLRLSAVQI

SEQ ID NO: 33265 - protein, 10 aa, Artificial Sequence
  Description of Artificial Sequence: Synthetic epitope
PNMLANKVKF

SEQ ID NO: 33266 - protein, 10 aa, Artificial Sequence
  Description of Artificial Sequence: Synthetic epitope
PNMMKLSLGS

SEQ ID NO: 33267 - protein, 10 aa, Artificial Sequence
  Description of Artificial Sequence: Synthetic epitope
PNMQGQGSST

SEQ ID NO: 33268 - protein, 10 aa, Artificial Sequence
  Description of Artificial Sequence: Synthetic epitope
PNNAQLGMAV

SEQ ID NO: 33269 - protein, 10 aa, Artificial Sequence
  Description of Artificial Sequence: Synthetic epitope
PNNHSTASPL

SEQ ID NO: 33270 - protein, 10 aa, Artificial Sequence
  Description of Artificial Sequence: Synthetic epitope
PNNIDENEKS

SEQ ID NO: 33271 - protein, 10 aa, Artificial Sequence
  Description of Artificial Sequence: Synthetic epitope
PNNISVSQYN

SEQ ID NO: 33272 - protein, 10 aa, Artificial Sequence
  Description of Artificial Sequence: Synthetic epitope
PNNKAKIGNK

SEQ ID NO: 33273 - protein, 10 aa, Artificial Sequence
  Description of Artificial Sequence: Synthetic epitope
PNNLSLVVHG

SEQ ID NO: 33274 - protein, 10 aa, Artificial Sequence
  Description of Artificial Sequence: Synthetic epitope
PNNSFVSNQI

SEQ ID NO: 33275 - protein, 10 aa, Artificial Sequence
  Description of Artificial Sequence: Synthetic epitope
PNNSLARKGQ

SEQ ID NO: 33276 - protein, 10 aa, Artificial Sequence
  Description of Artificial Sequence: Synthetic epitope
PNNSLTPSLQ

SEQ ID NO: 33277 - protein, 10 aa, Artificial Sequence
  Description of Artificial Sequence: Synthetic epitope
PNNSNAAEDD

SEQ ID NO: 33278 - protein, 10 aa, Artificial Sequence
  Description of Artificial Sequence: Synthetic epitope
PNNTALWQKY

SEQ ID NO: 33279 - protein, 10 aa, Artificial Sequence
  Description of Artificial Sequence: Synthetic epitope
PNPSIAKHTL

SEQ ID NO: 33280 - protein, 10 aa, Artificial Sequence
  Description of Artificial Sequence: Synthetic epitope
PNPTDKTSSI

SEQ ID NO: 33281 - protein, 10 aa, Artificial Sequence
  Description of Artificial Sequence: Synthetic epitope
PNPVEYETGK

SEQ ID NO: 33282 - protein, 10 aa, Artificial Sequence
  Description of Artificial Sequence: Synthetic epitope
PNQKSEAAEP

SEQ ID NO: 33283 - protein, 10 aa, Artificial Sequence
  Description of Artificial Sequence: Synthetic epitope
PNQLMSLQQF

SEQ ID NO: 33284 - protein, 10 aa, Artificial Sequence
  Description of Artificial Sequence: Synthetic epitope
PNQPITVKIT

SEQ ID NO: 33285 - protein, 10 aa, Artificial Sequence
  Description of Artificial Sequence: Synthetic epitope
PNQRNEKPTQ

SEQ ID NO: 33286 - protein, 10 aa, Artificial Sequence
  Description of Artificial Sequence: Synthetic epitope
PNQTSASKVG

SEQ ID NO: 33287 - protein, 10 aa, Artificial Sequence
  Description of Artificial Sequence: Synthetic epitope
PNRATSTETS

SEQ ID NO: 33288 - protein, 10 aa, Artificial Sequence
  Description of Artificial Sequence: Synthetic epitope
PNREATEISH

SEQ ID NO: 33289 - protein, 10 aa, Artificial Sequence
  Description of Artificial Sequence: Synthetic epitope
PNRLIHEKSP

SEQ ID NO: 33290 - protein, 10 aa, Artificial Sequence
  Description of Artificial Sequence: Synthetic epitope
PNRQLMTYWL

SEQ ID NO: 33291 - protein, 10 aa, Artificial Sequence
  Description of Artificial Sequence: Synthetic epitope
PNSAKAKKFY

SEQ ID NO: 33292 - protein, 10 aa, Artificial Sequence
  Description of Artificial Sequence: Synthetic epitope
PNSALLARAL

SEQ ID NO: 33293 - protein, 10 aa, Artificial Sequence
  Description of Artificial Sequence: Synthetic epitope
PNSASRDEFP

SEQ ID NO: 33294 - protein, 10 aa, Artificial Sequence
  Description of Artificial Sequence: Synthetic epitope
PNSATSSVPT

SEQ ID NO: 33295 - protein, 10 aa, Artificial Sequence
  Description of Artificial Sequence: Synthetic epitope
PNSDSEVQSL

SEQ ID NO: 33296 - protein, 10 aa, Artificial Sequence
  Description of Artificial Sequence: Synthetic epitope
PNSDSSRKDS

SEQ ID NO: 33297 - protein, 10 aa, Artificial Sequence
  Description of Artificial Sequence: Synthetic epitope
PNSDSLGMEE

SEQ ID NO: 33298 - protein, 10 aa, Artificial Sequence
  Description of Artificial Sequence: Synthetic epitope
PNSLSKRNVS

SEQ ID NO: 33299 - protein, 10 aa, Artificial Sequence
  Description of Artificial Sequence: Synthetic epitope
PNSNKSNKLS

SEQ ID NO: 33300 - protein, 10 aa, Artificial Sequence
  Description of Artificial Sequence: Synthetic epitope
PNSNMSSMVV

SEQ ID NO: 33301 - protein, 10 aa, Artificial Sequence
  Description of Artificial Sequence: Synthetic epitope
PNSNSTSTST

SEQ ID NO: 33302 - protein, 10 aa, Artificial Sequence
  Description of Artificial Sequence: Synthetic epitope
PNSTKVQRVL

SEQ ID NO: 33303 - protein, 10 aa, Artificial Sequence
  Description of Artificial Sequence: Synthetic epitope
PNSVKLDIFP

SEQ ID NO: 33304 - protein, 10 aa, Artificial Sequence
  Description of Artificial Sequence: Synthetic epitope
PNTDELMSRS

SEQ ID NO: 33305 - protein, 10 aa, Artificial Sequence
  Description of Artificial Sequence: Synthetic epitope
PNTNSRKVAE

SEQ ID NO: 33306 - protein, 10 aa, Artificial Sequence
  Description of Artificial Sequence: Synthetic epitope
PNTQLARLQQ

SEQ ID NO: 33307 - protein, 10 aa, Artificial Sequence
  Description of Artificial Sequence: Synthetic epitope
PNTSQQNFVT

SEQ ID NO: 33308 - protein, 10 aa, Artificial Sequence
  Description of Artificial Sequence: Synthetic epitope
PNTSRDSETA

SEQ ID NO: 33309 - protein, 10 aa, Artificial Sequence
  Description of Artificial Sequence: Synthetic epitope
PNTTSSQNGA

SEQ ID NO: 33310 - protein, 10 aa, Artificial Sequence
  Description of Artificial Sequence: Synthetic epitope
PNVASSLLKT

SEQ ID NO: 33311 - protein, 10 aa, Artificial Sequence
  Description of Artificial Sequence: Synthetic epitope
PNVDDKKTSN

SEQ ID NO: 33312 - protein, 10 aa, Artificial Sequence
  Description of Artificial Sequence: Synthetic epitope
PNVLLTSSDS

SEQ ID NO: 33313 - protein, 10 aa, Artificial Sequence
  Description of Artificial Sequence: Synthetic epitope
PNVPHYAKNK

SEQ ID NO: 33314 - protein, 10 aa, Artificial Sequence
  Description of Artificial Sequence: Synthetic epitope
PNVSEEAKEE

SEQ ID NO: 33315 - protein, 10 aa, Artificial Sequence
  Description of Artificial Sequence: Synthetic epitope
PNVTKITLES

SEQ ID NO: 33316 - protein, 10 aa, Artificial Sequence
  Description of Artificial Sequence: Synthetic epitope
PNVTSSAPSS

SEQ ID NO: 33317 - protein, 10 aa, Artificial Sequence
  Description of Artificial Sequence: Synthetic epitope
PNWKTARDPE

SEQ ID NO: 33318 - protein, 10 aa, Artificial Sequence
  Description of Artificial Sequence: Synthetic epitope
PNWQQLVSRE

SEQ ID NO: 33319 - protein, 10 aa, Artificial Sequence
  Description of Artificial Sequence: Synthetic epitope
PNWRTRGLEQ

SEQ ID NO: 33320 - protein, 10 aa, Artificial Sequence
  Description of Artificial Sequence: Synthetic epitope
PNYANKVSIP

SEQ ID NO: 33321 - protein, 10 aa, Artificial Sequence
  Description of Artificial Sequence: Synthetic epitope
PNYANKVSIP

SEQ ID NO: 33322 - protein, 10 aa, Artificial Sequence
  Description of Artificial Sequence: Synthetic epitope
PNYKDATTME

SEQ ID NO: 33323 - protein, 10 aa, Artificial Sequence
  Description of Artificial Sequence: Synthetic epitope
PNYNFKTHEE

SEQ ID NO: 33324 - protein, 10 aa, Artificial Sequence
  Description of Artificial Sequence: Synthetic epitope
PPAASDQGEV

SEQ ID NO: 33325 - protein, 10 aa, Artificial Sequence
  Description of Artificial Sequence: Synthetic epitope
PPAASSQNKG

SEQ ID NO: 33326 - protein, 10 aa, Artificial Sequence
  Description of Artificial Sequence: Synthetic epitope
PPAATAQVLQ

SEQ ID NO: 33327 - protein, 10 aa, Artificial Sequence
  Description of Artificial Sequence: Synthetic epitope
PPAATASQTQ

SEQ ID NO: 33328 - protein, 10 aa, Artificial Sequence
  Description of Artificial Sequence: Synthetic epitope
PPAATTDQDK

SEQ ID NO: 33329 - protein, 10 aa, Artificial Sequence
  Description of Artificial Sequence: Synthetic epitope
PPAASQISQQ

SEQ ID NO: 33330 - protein, 10 aa, Artificial Sequence
  Description of Artificial Sequence: Synthetic epitope
PPAESMSVYR

SEQ ID NO: 33331 - protein, 10 aa, Artificial Sequence
  Description of Artificial Sequence: Synthetic epitope
PPAIPYELPS

SEQ ID NO: 33332 - protein, 10 aa, Artificial Sequence
  Description of Artificial Sequence: Synthetic epitope
PPAKKAAESS

SEQ ID NO: 33333 - protein, 10 aa, Artificial Sequence
  Description of Artificial Sequence: Synthetic epitope
PPALSAKATA

SEQ ID NO: 33334 - protein, 10 aa, Artificial Sequence
  Description of Artificial Sequence: Synthetic epitope
PPAQATTLSS

SEQ ID NO: 33335 - protein, 10 aa, Artificial Sequence
  Description of Artificial Sequence: Synthetic epitope
PPAQETQEPS

SEQ ID NO: 33336 - protein, 10 aa, Artificial Sequence
  Description of Artificial Sequence: Synthetic epitope
PPARAASPSS

SEQ ID NO: 33337 - protein, 10 aa, Artificial Sequence
  Description of Artificial Sequence: Synthetic epitope
PPASQVTSIG

SEQ ID NO: 33338 - protein, 10 aa, Artificial Sequence
  Description of Artificial Sequence: Synthetic epitope
PPASSAAYSW

SEQ ID NO: 33339 - protein, 10 aa, Artificial Sequence
  Description of Artificial Sequence: Synthetic epitope
PPATLKVAEP

SEQ ID NO: 33340 - protein, 10 aa, Artificial Sequence
  Description of Artificial Sequence: Synthetic epitope
PPATSAERTN

SEQ ID NO: 33341 - protein, 10 aa, Artificial Sequence
  Description of Artificial Sequence: Synthetic epitope
PPATSISGGS

SEQ ID NO: 33342 - protein, 10 aa, Artificial Sequence
  Description of Artificial Sequence: Synthetic epitope
PPDADVAKST

SEQ ID NO: 33343 - protein, 10 aa, Artificial Sequence
  Description of Artificial Sequence: Synthetic epitope
PPDASAARGG

SEQ ID NO: 33344 - protein, 10 aa, Artificial Sequence
  Description of Artificial Sequence: Synthetic epitope
PPDESIDLYQ

SEQ ID NO: 33345 - protein, 10 aa, Artificial Sequence
  Description of Artificial Sequence: Synthetic epitope
PPDHAERAEE

SEQ ID NO: 33346 - protein, 10 aa, Artificial Sequence
  Description of Artificial Sequence: Synthetic epitope
PPDQKQDRGA

SEQ ID NO: 33347 - protein, 10 aa, Artificial Sequence
  Description of Artificial Sequence: Synthetic epitope
PPDSSEAEII

SEQ ID NO: 33348 - protein, 10 aa, Artificial Sequence
  Description of Artificial Sequence: Synthetic epitope
PPDSSLSKQQ

SEQ ID NO: 33349 - protein, 10 aa, Artificial Sequence
  Description of Artificial Sequence: Synthetic epitope
PPDTITKKAG

SEQ ID NO: 33350 - protein, 10 aa, Artificial Sequence
  Description of Artificial Sequence: Synthetic epitope
PPDTNSMELG

SEQ ID NO: 33351 - protein, 10 aa, Artificial Sequence
  Description of Artificial Sequence: Synthetic epitope
PPEALAAKLE

SEQ ID NO: 33352 - protein, 10 aa, Artificial Sequence
  Description of Artificial Sequence: Synthetic epitope
PPEARALAMS

SEQ ID NO: 33353 - protein, 10 aa, Artificial Sequence
  Description of Artificial Sequence: Synthetic epitope
PPEASSQRRN

SEQ ID NO: 33354 - protein, 10 aa, Artificial Sequence
  Description of Artificial Sequence: Synthetic epitope
PPEGLAQSEL

SEQ ID NO: 33355 - protein, 10 aa, Artificial Sequence
  Description of Artificial Sequence: Synthetic epitope
PPELENNKTM

SEQ ID NO: 33356 - protein, 10 aa, Artificial Sequence
  Description of Artificial Sequence: Synthetic epitope
PPELKVETQF

SEQ ID NO: 33357 - protein, 10 aa, Artificial Sequence
  Description of Artificial Sequence: Synthetic epitope
PPESELEVAP

SEQ ID NO: 33358 - protein, 10 aa, Artificial Sequence
  Description of Artificial Sequence: Synthetic epitope
PPESVAATVS

SEQ ID NO: 33359 - protein, 10 aa, Artificial Sequence
  Description of Artificial Sequence: Synthetic epitope
PPETQASETS

SEQ ID NO: 33360 - protein, 10 aa, Artificial Sequence
  Description of Artificial Sequence: Synthetic epitope
PPETTAADLS

SEQ ID NO: 33361 - protein, 10 aa, Artificial Sequence
  Description of Artificial Sequence: Synthetic epitope
PPEVTLVLTK

SEQ ID NO: 33362 - protein, 10 aa, Artificial Sequence
  Description of Artificial Sequence: Synthetic epitope
PPGENTVMAD

SEQ ID NO: 33363 - protein, 10 aa, Artificial Sequence
  Description of Artificial Sequence: Synthetic epitope
PPGIMLEYEK

SEQ ID NO: 33364 - protein, 10 aa, Artificial Sequence
  Description of Artificial Sequence: Synthetic epitope
PPGSMSAFTS

SEQ ID NO: 33365 - protein, 10 aa, Artificial Sequence
  Description of Artificial Sequence: Synthetic epitope
PPHIATEIDR

SEQ ID NO: 33366 - protein, 10 aa, Artificial Sequence
  Description of Artificial Sequence: Synthetic epitope
PPHQASVSGI

SEQ ID NO: 33367 - protein, 10 aa, Artificial Sequence
  Description of Artificial Sequence: Synthetic epitope
PPHSISTEFQ

SEQ ID NO: 33368 - protein, 10 aa, Artificial Sequence
  Description of Artificial Sequence: Synthetic epitope
PPHVAAGWSP

SEQ ID NO: 33369 - protein, 10 aa, Artificial Sequence
  Description of Artificial Sequence: Synthetic epitope
PPIDRQKRLS

SEQ ID NO: 33370 - protein, 10 aa, Artificial Sequence
  Description of Artificial Sequence: Synthetic epitope
PPIEASSGKM

SEQ ID NO: 33371 - protein, 10 aa, Artificial Sequence
  Description of Artificial Sequence: Synthetic epitope
PPIERAFAQK

SEQ ID NO: 33372 - protein, 10 aa, Artificial Sequence
  Description of Artificial Sequence: Synthetic epitope
PPIKSAVQTM

SEQ ID NO: 33373 - protein, 10 aa, Artificial Sequence
  Description of Artificial Sequence: Synthetic epitope
PPIKTYEARS

SEQ ID NO: 33374 - protein, 10 aa, Artificial Sequence
  Description of Artificial Sequence: Synthetic epitope
PPISLNNLEL

SEQ ID NO: 33375 - protein, 10 aa, Artificial Sequence
  Description of Artificial Sequence: Synthetic epitope
PPISTNATAK

SEQ ID NO: 33376 - protein, 10 aa, Artificial Sequence
  Description of Artificial Sequence: Synthetic epitope
PPITAQQGNW

SEQ ID NO: 33377 - protein, 10 aa, Artificial Sequence
  Description of Artificial Sequence: Synthetic epitope
PPKAEAKAKA

SEQ ID NO: 33378 - protein, 10 aa, Artificial Sequence
  Description of Artificial Sequence: Synthetic epitope
PPKFAVVFSP

SEQ ID NO: 33379 - protein, 10 aa, Artificial Sequence
  Description of Artificial Sequence: Synthetic epitope
PPKFAVVFSP

SEQ ID NO: 33380 - protein, 10 aa, Artificial Sequence
  Description of Artificial Sequence: Synthetic epitope
PPKIAWPMKF

SEQ ID NO: 33381 - protein, 10 aa, Artificial Sequence
  Description of Artificial Sequence: Synthetic epitope
PPKKAKSSDS

SEQ ID NO: 33382 - protein, 10 aa, Artificial Sequence
  Description of Artificial Sequence: Synthetic epitope
PPKLILLPSS

SEQ ID NO: 33383 - protein, 10 aa, Artificial Sequence
  Description of Artificial Sequence: Synthetic epitope
PPKNAKAKID

SEQ ID NO: 33384 - protein, 10 aa, Artificial Sequence
  Description of Artificial Sequence: Synthetic epitope
PPKQLDMGDE

SEQ ID NO: 33385 - protein, 10 aa, Artificial Sequence
  Description of Artificial Sequence: Synthetic epitope
PPKRATEMQS

SEQ ID NO: 33386 - protein, 10 aa, Artificial Sequence
  Description of Artificial Sequence: Synthetic epitope
PPKSAIKPSG

SEQ ID NO: 33387 - protein, 10 aa, Artificial Sequence
  Description of Artificial Sequence: Synthetic epitope
PPKSQASAKF

SEQ ID NO: 33388 - protein, 10 aa, Artificial Sequence
  Description of Artificial Sequence: Synthetic epitope
PPKTAKVSEP

SEQ ID NO: 33389 - protein, 10 aa, Artificial Sequence
  Description of Artificial Sequence: Synthetic epitope
PPKTGIDNPM

SEQ ID NO: 33390 - protein, 10 aa, Artificial Sequence
  Description of Artificial Sequence: Synthetic epitope
PPKVLTSPAT

SEQ ID NO: 33391 - protein, 10 aa, Artificial Sequence
  Description of Artificial Sequence: Synthetic epitope
PPLESSESSE

SEQ ID NO: 33392 - protein, 10 aa, Artificial Sequence
  Description of Artificial Sequence: Synthetic epitope
PPLIETSINQ

SEQ ID NO: 33393 - protein, 10 aa, Artificial Sequence
  Description of Artificial Sequence: Synthetic epitope
PPLISSAKHP

SEQ ID NO: 33394 - protein, 10 aa, Artificial Sequence
  Description of Artificial Sequence: Synthetic epitope
PPLNVAQRYV

SEQ ID NO: 33395 - protein, 10 aa, Artificial Sequence
  Description of Artificial Sequence: Synthetic epitope
PPLSAITHGT

SEQ ID NO: 33396 - protein, 10 aa, Artificial Sequence
  Description of Artificial Sequence: Synthetic epitope
PPLTAKDLSS

SEQ ID NO: 33397 - protein, 10 aa, Artificial Sequence
  Description of Artificial Sequence: Synthetic epitope
PPLVKTSLFS

SEQ ID NO: 33398 - protein, 10 aa, Artificial Sequence
  Description of Artificial Sequence: Synthetic epitope
PPLVMSVSGP

SEQ ID NO: 33399 - protein, 10 aa, Artificial Sequence
  Description of Artificial Sequence: Synthetic epitope
PPMKLEMDVR

SEQ ID NO: 33400 - protein, 10 aa, Artificial Sequence
  Description of Artificial Sequence: Synthetic epitope
PPMPSVEMHM

SEQ ID NO: 33401 - protein, 10 aa, Artificial Sequence
  Description of Artificial Sequence: Synthetic epitope
PPMTVTTSTR

SEQ ID NO: 33402 - protein, 10 aa, Artificial Sequence
  Description of Artificial Sequence: Synthetic epitope
PPNKMANVYT

SEQ ID NO: 33403 - protein, 10 aa, Artificial Sequence
  Description of Artificial Sequence: Synthetic epitope
PPNLMARQTP

SEQ ID NO: 33404 - protein, 10 aa, Artificial Sequence
  Description of Artificial Sequence: Synthetic epitope
PPNLTRSALL

SEQ ID NO: 33405 - protein, 10 aa, Artificial Sequence
  Description of Artificial Sequence: Synthetic epitope
PPNMSAELIQ

SEQ ID NO: 33406 - protein, 10 aa, Artificial Sequence
  Description of Artificial Sequence: Synthetic epitope
PPNQKKGSRT

SEQ ID NO: 33407 - protein, 10 aa, Artificial Sequence
  Description of Artificial Sequence: Synthetic epitope
PPNSSNSVVP

SEQ ID NO: 33408 - protein, 10 aa, Artificial Sequence
  Description of Artificial Sequence: Synthetic epitope
PPNSTLTKTL

SEQ ID NO: 33409 - protein, 10 aa, Artificial Sequence
  Description of Artificial Sequence: Synthetic epitope
PPQAAWAAPR

SEQ ID NO: 33410 - protein, 10 aa, Artificial Sequence
  Description of Artificial Sequence: Synthetic epitope
PPQASTASVA

SEQ ID NO: 33411 - protein, 10 aa, Artificial Sequence
  Description of Artificial Sequence: Synthetic epitope
PPQMPQQYSG

SEQ ID NO: 33412 - protein, 10 aa, Artificial Sequence
  Description of Artificial Sequence: Synthetic epitope
PPQNTITWEE

SEQ ID NO: 33413 - protein, 10 aa, Artificial Sequence
  Description of Artificial Sequence: Synthetic epitope
PPQQNTRQTA

SEQ ID NO: 33414 - protein, 10 aa, Artificial Sequence
  Description of Artificial Sequence: Synthetic epitope
PPQQRYLQHH

SEQ ID NO: 33415 - protein, 10 aa, Artificial Sequence
  Description of Artificial Sequence: Synthetic epitope
PPQRSSETMQ

SEQ ID NO: 33416 - protein, 10 aa, Artificial Sequence
  Description of Artificial Sequence: Synthetic epitope
PPQSLQVFPQ

SEQ ID NO: 33417 - protein, 10 aa, Artificial Sequence
  Description of Artificial Sequence: Synthetic epitope
PPQSMTDQPQ

SEQ ID NO: 33418 - protein, 10 aa, Artificial Sequence
  Description of Artificial Sequence: Synthetic epitope
PPQTASEAPS

SEQ ID NO: 33419 - protein, 10 aa, Artificial Sequence
  Description of Artificial Sequence: Synthetic epitope
PPQTKSAAQP

SEQ ID NO: 33420 - protein, 10 aa, Artificial Sequence
  Description of Artificial Sequence: Synthetic epitope
PPQTQTESQL

SEQ ID NO: 33421 - protein, 10 aa, Artificial Sequence
  Description of Artificial Sequence: Synthetic epitope
PPRALSSLAA

SEQ ID NO: 33422 - protein, 10 aa, Artificial Sequence
  Description of Artificial Sequence: Synthetic epitope
PPRDEWNDFN

SEQ ID NO: 33423 - protein, 10 aa, Artificial Sequence
  Description of Artificial Sequence: Synthetic epitope
PPRGNTNAAR

SEQ ID NO: 33424 - protein, 10 aa, Artificial Sequence
  Description of Artificial Sequence: Synthetic epitope
PPRKTSESRD

SEQ ID NO: 33425 - protein, 10 aa, Artificial Sequence
  Description of Artificial Sequence: Synthetic epitope
PPRLKAMTSQ

SEQ ID NO: 33426 - protein, 10 aa, Artificial Sequence
  Description of Artificial Sequence: Synthetic epitope
PPRMRTKREE

SEQ ID NO: 33427 - protein, 10 aa, Artificial Sequence
  Description of Artificial Sequence: Synthetic epitope
PPRQSLQEQL

SEQ ID NO: 33428 - protein, 10 aa, Artificial Sequence
  Description of Artificial Sequence: Synthetic epitope
PPRSAILTSM

SEQ ID NO: 33429 - protein, 10 aa, Artificial Sequence
  Description of Artificial Sequence: Synthetic epitope
PPRSISQSIS

SEQ ID NO: 33430 - protein, 10 aa, Artificial Sequence
  Description of Artificial Sequence: Synthetic epitope
PPRTSMTEEY

SEQ ID NO: 33431 - protein, 10 aa, Artificial Sequence
  Description of Artificial Sequence: Synthetic epitope
PPSAASASHA

SEQ ID NO: 33432 - protein, 10 aa, Artificial Sequence
  Description of Artificial Sequence: Synthetic epitope
PPSAGAAVTA

SEQ ID NO: 33433 - protein, 10 aa, Artificial Sequence
  Description of Artificial Sequence: Synthetic epitope
PPSATLAEPQ

SEQ ID NO: 33434 - protein, 10 aa, Artificial Sequence
  Description of Artificial Sequence: Synthetic epitope
PPSAVEEREA

SEQ ID NO: 33435 - protein, 10 aa, Artificial Sequence
  Description of Artificial Sequence: Synthetic epitope
PPSELETNPA

SEQ ID NO: 33436 - protein, 10 aa, Artificial Sequence
  Description of Artificial Sequence: Synthetic epitope
PPSEQSSPPS

SEQ ID NO: 33437 - protein, 10 aa, Artificial Sequence
  Description of Artificial Sequence: Synthetic epitope
PPSESKSKSP

SEQ ID NO: 33438 - protein, 10 aa, Artificial Sequence
  Description of Artificial Sequence: Synthetic epitope
PPSESMEGPS

SEQ ID NO: 33439 - protein, 10 aa, Artificial Sequence
  Description of Artificial Sequence: Synthetic epitope
PPSETIAIVE

SEQ ID NO: 33440 - protein, 10 aa, Artificial Sequence
  Description of Artificial Sequence: Synthetic epitope
PPSIQIKRVM

SEQ ID NO: 33441 - protein, 10 aa, Artificial Sequence
  Description of Artificial Sequence: Synthetic epitope
PPSKWNISIF

SEQ ID NO: 33442 - protein, 10 aa, Artificial Sequence
  Description of Artificial Sequence: Synthetic epitope
PPSLRASDAS

SEQ ID NO: 33443 - protein, 10 aa, Artificial Sequence
  Description of Artificial Sequence: Synthetic epitope
PPSQKYKSEK

SEQ ID NO: 33444 - protein, 10 aa, Artificial Sequence
  Description of Artificial Sequence: Synthetic epitope
PPSQRSAEQP

SEQ ID NO: 33445 - protein, 10 aa, Artificial Sequence
  Description of Artificial Sequence: Synthetic epitope
PPSQSQDKDM

SEQ ID NO: 33446 - protein, 10 aa, Artificial Sequence
  Description of Artificial Sequence: Synthetic epitope
PPSRHAGGKA

SEQ ID NO: 33447 - protein, 10 aa, Artificial Sequence
  Description of Artificial Sequence: Synthetic epitope
PPSSLKNNRE

SEQ ID NO: 33448 - protein, 10 aa, Artificial Sequence
  Description of Artificial Sequence: Synthetic epitope
PPSTHSKTSA

SEQ ID NO: 33449 - protein, 10 aa, Artificial Sequence
  Description of Artificial Sequence: Synthetic epitope
PPSTQVKKGE

SEQ ID NO: 33450 - protein, 10 aa, Artificial Sequence
  Description of Artificial Sequence: Synthetic epitope
PPSVFAEVPQ

SEQ ID NO: 33451 - protein, 10 aa, Artificial Sequence
  Description of Artificial Sequence: Synthetic epitope
PPSVQFMNRL

SEQ ID NO: 33452 - protein, 10 aa, Artificial Sequence
  Description of Artificial Sequence: Synthetic epitope
PPSYSTAKNS

SEQ ID NO: 33453 - protein, 10 aa, Artificial Sequence
  Description of Artificial Sequence: Synthetic epitope
PPTELVKATQ

SEQ ID NO: 33454 - protein, 10 aa, Artificial Sequence
  Description of Artificial Sequence: Synthetic epitope
PPTGLMVKKS

SEQ ID NO: 33455 - protein, 10 aa, Artificial Sequence
  Description of Artificial Sequence: Synthetic epitope
PPTPPSITSS

SEQ ID NO: 33456 - protein, 10 aa, Artificial Sequence
  Description of Artificial Sequence: Synthetic epitope
PPTQEAQGET

SEQ ID NO: 33457 - protein, 10 aa, Artificial Sequence
  Description of Artificial Sequence: Synthetic epitope
PPTQTSVRVT

SEQ ID NO: 33458 - protein, 10 aa, Artificial Sequence
  Description of Artificial Sequence: Synthetic epitope
PPTSALRSRD

SEQ ID NO: 33459 - protein, 10 aa, Artificial Sequence
  Description of Artificial Sequence: Synthetic epitope
PPTVEARYKS

SEQ ID NO: 33460 - protein, 10 aa, Artificial Sequence
  Description of Artificial Sequence: Synthetic epitope
PPTVEARYKS

SEQ ID NO: 33461 - protein, 10 aa, Artificial Sequence
  Description of Artificial Sequence: Synthetic epitope
PPTVEARYKS

SEQ ID NO: 33462 - protein, 10 aa, Artificial Sequence
  Description of Artificial Sequence: Synthetic epitope
PPTVEARYKS

SEQ ID NO: 33463 - protein, 10 aa, Artificial Sequence
  Description of Artificial Sequence: Synthetic epitope
PPTVEARYKS

SEQ ID NO: 33464 - protein, 10 aa, Artificial Sequence
  Description of Artificial Sequence: Synthetic epitope
PPTVEARYKS

SEQ ID NO: 33465 - protein, 10 aa, Artificial Sequence
  Description of Artificial Sequence: Synthetic epitope
PPVAAFVRAQ

SEQ ID NO: 33466 - protein, 10 aa, Artificial Sequence
  Description of Artificial Sequence: Synthetic epitope
PPVATATATT

SEQ ID NO: 33467 - protein, 10 aa, Artificial Sequence
  Description of Artificial Sequence: Synthetic epitope
PPVDFMKNQE

SEQ ID NO: 33468 - protein, 10 aa, Artificial Sequence
  Description of Artificial Sequence: Synthetic epitope
PPVDSTIQHS

SEQ ID NO: 33469 - protein, 10 aa, Artificial Sequence
  Description of Artificial Sequence: Synthetic epitope
PPVENTLSPK

SEQ ID NO: 33470 - protein, 10 aa, Artificial Sequence
  Description of Artificial Sequence: Synthetic epitope
PPVITETRTE

SEQ ID NO: 33471 - protein, 10 aa, Artificial Sequence
  Description of Artificial Sequence: Synthetic epitope
PPVKLQKQKV

SEQ ID NO: 33472 - protein, 10 aa, Artificial Sequence
  Description of Artificial Sequence: Synthetic epitope
PPVNKQENAG

SEQ ID NO: 33473 - protein, 10 aa, Artificial Sequence
  Description of Artificial Sequence: Synthetic epitope
PPVNTSKLLR

SEQ ID NO: 33474 - protein, 10 aa, Artificial Sequence
  Description of Artificial Sequence: Synthetic epitope
PPVQAKSTSP

SEQ ID NO: 33475 - protein, 10 aa, Artificial Sequence
  Description of Artificial Sequence: Synthetic epitope
PPVQRIQMTR

SEQ ID NO: 33476 - protein, 10 aa, Artificial Sequence
  Description of Artificial Sequence: Synthetic epitope
PPVRATGARA

SEQ ID NO: 33477 - protein, 10 aa, Artificial Sequence
  Description of Artificial Sequence: Synthetic epitope
PPVSAQSAFS

SEQ ID NO: 33478 - protein, 10 aa, Artificial Sequence
  Description of Artificial Sequence: Synthetic epitope
PPVSAVNKSG

SEQ ID NO: 33479 - protein, 10 aa, Artificial Sequence
  Description of Artificial Sequence: Synthetic epitope
PPVSSNSKTA

SEQ ID NO: 33480 - protein, 10 aa, Artificial Sequence
  Description of Artificial Sequence: Synthetic epitope
PPVTAGSLSW

SEQ ID NO: 33481 - protein, 10 aa, Artificial Sequence
  Description of Artificial Sequence: Synthetic epitope
PPVTQAAGAL

SEQ ID NO: 33482 - protein, 10 aa, Artificial Sequence
  Description of Artificial Sequence: Synthetic epitope
PPWDFREFEV

SEQ ID NO: 33483 - protein, 10 aa, Artificial Sequence
  Description of Artificial Sequence: Synthetic epitope
PPYAASAEEV

SEQ ID NO: 33484 - protein, 10 aa, Artificial Sequence
  Description of Artificial Sequence: Synthetic epitope
PPYMQEGIQP

SEQ ID NO: 33485 - protein, 10 aa, Artificial Sequence
  Description of Artificial Sequence: Synthetic epitope
PPYQQLAYSQ

SEQ ID NO: 33486 - protein, 10 aa, Artificial Sequence
  Description of Artificial Sequence: Synthetic epitope
PQAASTTKSA

SEQ ID NO: 33487 - protein, 10 aa, Artificial Sequence
  Description of Artificial Sequence: Synthetic epitope
PQAAVVKALG

SEQ ID NO: 33488 - protein, 10 aa, Artificial Sequence
  Description of Artificial Sequence: Synthetic epitope
PQAELGKPRE

SEQ ID NO: 33489 - protein, 10 aa, Artificial Sequence
  Description of Artificial Sequence: Synthetic epitope
PQAKAAKAPP

SEQ ID NO: 33490 - protein, 10 aa, Artificial Sequence
  Description of Artificial Sequence: Synthetic epitope
PQALATRALP

SEQ ID NO: 33491 - protein, 10 aa, Artificial Sequence
  Description of Artificial Sequence: Synthetic epitope
PQALDTVELE

SEQ ID NO: 33492 - protein, 10 aa, Artificial Sequence
  Description of Artificial Sequence: Synthetic epitope
PQALKSRIAL

SEQ ID NO: 33493 - protein, 10 aa, Artificial Sequence
  Description of Artificial Sequence: Synthetic epitope
PQALVAMEKE

SEQ ID NO: 33494 - protein, 10 aa, Artificial Sequence
  Description of Artificial Sequence: Synthetic epitope
PQAMGTRHTN

SEQ ID NO: 33495 - protein, 10 aa, Artificial Sequence
  Description of Artificial Sequence: Synthetic epitope
PQAQATQVSD

SEQ ID NO: 33496 - protein, 10 aa, Artificial Sequence
  Description of Artificial Sequence: Synthetic epitope
PQAQPVLVFK

SEQ ID NO: 33497 - protein, 10 aa, Artificial Sequence
  Description of Artificial Sequence: Synthetic epitope
PQAQTDQAQS

SEQ ID NO: 33498 - protein, 10 aa, Artificial Sequence
  Description of Artificial Sequence: Synthetic epitope
PQASALATVK

SEQ ID NO: 33499 - protein, 10 aa, Artificial Sequence
  Description of Artificial Sequence: Synthetic epitope
PQASAMKRSD

SEQ ID NO: 33500 - protein, 10 aa, Artificial Sequence
  Description of Artificial Sequence: Synthetic epitope
PQASLKASDL

SEQ ID NO: 33501 - protein, 10 aa, Artificial Sequence
  Description of Artificial Sequence: Synthetic epitope
PQASLTATHS

SEQ ID NO: 33502 - protein, 10 aa, Artificial Sequence
  Description of Artificial Sequence: Synthetic epitope
PQASSAASAS

SEQ ID NO: 33503 - protein, 10 aa, Artificial Sequence
  Description of Artificial Sequence: Synthetic epitope
PQASVARHPS

SEQ ID NO: 33504 - protein, 10 aa, Artificial Sequence
  Description of Artificial Sequence: Synthetic epitope
PQASVSQQFT

SEQ ID NO: 33505 - protein, 10 aa, Artificial Sequence
  Description of Artificial Sequence: Synthetic epitope
PQATASMKDG

SEQ ID NO: 33506 - protein, 10 aa, Artificial Sequence
  Description of Artificial Sequence: Synthetic epitope
PQDAKLLRKA

SEQ ID NO: 33507 - protein, 10 aa, Artificial Sequence
  Description of Artificial Sequence: Synthetic epitope
PQDAVSSNLR

SEQ ID NO: 33508 - protein, 10 aa, Artificial Sequence
  Description of Artificial Sequence: Synthetic epitope
PQDGVQQWTE

SEQ ID NO: 33509 - protein, 10 aa, Artificial Sequence
  Description of Artificial Sequence: Synthetic epitope
PQDLAVAQYA

SEQ ID NO: 33510 - protein, 10 aa, Artificial Sequence
  Description of Artificial Sequence: Synthetic epitope
PQDLLAASLT

SEQ ID NO: 33511 - protein, 10 aa, Artificial Sequence
  Description of Artificial Sequence: Synthetic epitope
PQDLSMAMQK

SEQ ID NO: 33512 - protein, 10 aa, Artificial Sequence
  Description of Artificial Sequence: Synthetic epitope
PQDQTNKMPT

SEQ ID NO: 33513 - protein, 10 aa, Artificial Sequence
  Description of Artificial Sequence: Synthetic epitope
PQDSSEQPQE

SEQ ID NO: 33514 - protein, 10 aa, Artificial Sequence
  Description of Artificial Sequence: Synthetic epitope
PQEAASTASR

SEQ ID NO: 33515 - protein, 10 aa, Artificial Sequence
  Description of Artificial Sequence: Synthetic epitope
PQEAELVSSN

SEQ ID NO: 33516 - protein, 10 aa, Artificial Sequence
  Description of Artificial Sequence: Synthetic epitope
PQEALLKLLA

SEQ ID NO: 33517 - protein, 10 aa, Artificial Sequence
  Description of Artificial Sequence: Synthetic epitope
PQEASEEATA

SEQ ID NO: 33518 - protein, 10 aa, Artificial Sequence
  Description of Artificial Sequence: Synthetic epitope
PQEDMAIDYE

SEQ ID NO: 33519 - protein, 10 aa, Artificial Sequence
  Description of Artificial Sequence: Synthetic epitope
PQEEAIIDKY

SEQ ID NO: 33520 - protein, 10 aa, Artificial Sequence
  Description of Artificial Sequence: Synthetic epitope
PQEEQNQTEH

SEQ ID NO: 33521 - protein, 10 aa, Artificial Sequence
  Description of Artificial Sequence: Synthetic epitope
PQEIIANAKA

SEQ ID NO: 33522 - protein, 10 aa, Artificial Sequence
  Description of Artificial Sequence: Synthetic epitope
PQEIVSQEDT

SEQ ID NO: 33523 - protein, 10 aa, Artificial Sequence
  Description of Artificial Sequence: Synthetic epitope
PQELFSILST

SEQ ID NO: 33524 - protein, 10 aa, Artificial Sequence
  Description of Artificial Sequence: Synthetic epitope
PQELSAPTKA

SEQ ID NO: 33525 - protein, 10 aa, Artificial Sequence
  Description of Artificial Sequence: Synthetic epitope
PQEMSQMKPH

SEQ ID NO: 33526 - protein, 10 aa, Artificial Sequence
  Description of Artificial Sequence: Synthetic epitope
PQEPQIGGEG

SEQ ID NO: 33527 - protein, 10 aa, Artificial Sequence
  Description of Artificial Sequence: Synthetic epitope
PQEQDDTPDW

SEQ ID NO: 33528 - protein, 10 aa, Artificial Sequence
  Description of Artificial Sequence: Synthetic epitope
PQEQMNPKEK

SEQ ID NO: 33529 - protein, 10 aa, Artificial Sequence
  Description of Artificial Sequence: Synthetic epitope
PQERESDQHV

SEQ ID NO: 33530 - protein, 10 aa, Artificial Sequence
  Description of Artificial Sequence: Synthetic epitope
PQERMVGELR

SEQ ID NO: 33531 - protein, 10 aa, Artificial Sequence
  Description of Artificial Sequence: Synthetic epitope
PQERVTKLAP

SEQ ID NO: 33532 - protein, 10 aa, Artificial Sequence
  Description of Artificial Sequence: Synthetic epitope
PQESATVSEK

SEQ ID NO: 33533 - protein, 10 aa, Artificial Sequence
  Description of Artificial Sequence: Synthetic epitope
PQEVAFQLRS

SEQ ID NO: 33534 - protein, 10 aa, Artificial Sequence
  Description of Artificial Sequence: Synthetic epitope
PQFAEKGEQG

SEQ ID NO: 33535 - protein, 10 aa, Artificial Sequence
  Description of Artificial Sequence: Synthetic epitope
PQFDTKVIIQ

SEQ ID NO: 33536 - protein, 10 aa, Artificial Sequence
  Description of Artificial Sequence: Synthetic epitope
PQFMRQIAVR

SEQ ID NO: 33537 - protein, 10 aa, Artificial Sequence
  Description of Artificial Sequence: Synthetic epitope
PQFQRLRYIK

SEQ ID NO: 33538 - protein, 10 aa, Artificial Sequence
  Description of Artificial Sequence: Synthetic epitope
PQFQRQPQWD

SEQ ID NO: 33539 - protein, 10 aa, Artificial Sequence
  Description of Artificial Sequence: Synthetic epitope
PQFTRAQWFA

SEQ ID NO: 33540 - protein, 10 aa, Artificial Sequence
  Description of Artificial Sequence: Synthetic epitope
PQGANLQTPV

SEQ ID NO: 33541 - protein, 10 aa, Artificial Sequence
  Description of Artificial Sequence: Synthetic epitope
PQGHSSQRSI

SEQ ID NO: 33542 - protein, 10 aa, Artificial Sequence
  Description of Artificial Sequence: Synthetic epitope
PQGISMLDAE

SEQ ID NO: 33543 - protein, 10 aa, Artificial Sequence
  Description of Artificial Sequence: Synthetic epitope
PQGLSQSVVD

SEQ ID NO: 33544 - protein, 10 aa, Artificial Sequence
  Description of Artificial Sequence: Synthetic epitope
PQGNSVDRMA

SEQ ID NO: 33545 - protein, 10 aa, Artificial Sequence
  Description of Artificial Sequence: Synthetic epitope
PQGSQQEQGE

SEQ ID NO: 33546 - protein, 10 aa, Artificial Sequence
  Description of Artificial Sequence: Synthetic epitope
PQHELQQGQK

SEQ ID NO: 33547 - protein, 10 aa, Artificial Sequence
  Description of Artificial Sequence: Synthetic epitope
PQHERIITVS

SEQ ID NO: 33548 - protein, 10 aa, Artificial Sequence
  Description of Artificial Sequence: Synthetic epitope
PQHIPNSQQY

SEQ ID NO: 33549 - protein, 10 aa, Artificial Sequence
  Description of Artificial Sequence: Synthetic epitope
PQIAKKQSTH

SEQ ID NO: 33550 - protein, 10 aa, Artificial Sequence
  Description of Artificial Sequence: Synthetic epitope
PQIDAVKRRT

SEQ ID NO: 33551 - protein, 10 aa, Artificial Sequence
  Description of Artificial Sequence: Synthetic epitope
PQIDSNKSNN

SEQ ID NO: 33552 - protein, 10 aa, Artificial Sequence
  Description of Artificial Sequence: Synthetic epitope
PQIILPKQKE

SEQ ID NO: 33553 - protein, 10 aa, Artificial Sequence
  Description of Artificial Sequence: Synthetic epitope
PQILAGSLKA

SEQ ID NO: 33554 - protein, 10 aa, Artificial Sequence
  Description of Artificial Sequence: Synthetic epitope
PQIRSESSAQ

SEQ ID NO: 33555 - protein, 10 aa, Artificial Sequence
  Description of Artificial Sequence: Synthetic epitope
PQISAVLAAR

SEQ ID NO: 33556 - protein, 10 aa, Artificial Sequence
  Description of Artificial Sequence: Synthetic epitope
PQISSIIQGQ

SEQ ID NO: 33557 - protein, 10 aa, Artificial Sequence
  Description of Artificial Sequence: Synthetic epitope
PQISSIIQGQ

SEQ ID NO: 33558 - protein, 10 aa, Artificial Sequence
  Description of Artificial Sequence: Synthetic epitope
PQISSTNYNT

SEQ ID NO: 33559 - protein, 10 aa, Artificial Sequence
  Description of Artificial Sequence: Synthetic epitope
PQITVKRIST

SEQ ID NO: 33560 - protein, 10 aa, Artificial Sequence
  Description of Artificial Sequence: Synthetic epitope
PQKADEQLKQ

SEQ ID NO: 33561 - protein, 10 aa, Artificial Sequence
  Description of Artificial Sequence: Synthetic epitope
PQKEINSLNL

SEQ ID NO: 33562 - protein, 10 aa, Artificial Sequence
  Description of Artificial Sequence: Synthetic epitope
PQKEQDDAKA

SEQ ID NO: 33563 - protein, 10 aa, Artificial Sequence
  Description of Artificial Sequence: Synthetic epitope
PQKETANSQQ

SEQ ID NO: 33564 - protein, 10 aa, Artificial Sequence
  Description of Artificial Sequence: Synthetic epitope
PQKFAGVNKA

SEQ ID NO: 33565 - protein, 10 aa, Artificial Sequence
  Description of Artificial Sequence: Synthetic epitope
PQKHVLTSHI

SEQ ID NO: 33566 - protein, 10 aa, Artificial Sequence
  Description of Artificial Sequence: Synthetic epitope
PQKLNVEEKL

SEQ ID NO: 33567 - protein, 10 aa, Artificial Sequence
  Description of Artificial Sequence: Synthetic epitope
PQKQEEQRQH

SEQ ID NO: 33568 - protein, 10 aa, Artificial Sequence
  Description of Artificial Sequence: Synthetic epitope
PQKRTSRHMQ

SEQ ID NO: 33569 - protein, 10 aa, Artificial Sequence
  Description of Artificial Sequence: Synthetic epitope
PQKSGSQGSV

SEQ ID NO: 33570 - protein, 10 aa, Artificial Sequence
  Description of Artificial Sequence: Synthetic epitope
PQKTSPLTKI

SEQ ID NO: 33571 - protein, 10 aa, Artificial Sequence
  Description of Artificial Sequence: Synthetic epitope
PQKTTASSTK

SEQ ID NO: 33572 - protein, 10 aa, Artificial Sequence
  Description of Artificial Sequence: Synthetic epitope
PQKYENENVE

SEQ ID NO: 33573 - protein, 10 aa, Artificial Sequence
  Description of Artificial Sequence: Synthetic epitope
PQKYRRKLVS

SEQ ID NO: 33574 - protein, 10 aa, Artificial Sequence
  Description of Artificial Sequence: Synthetic epitope
PQLEERGTEN

SEQ ID NO: 33575 - protein, 10 aa, Artificial Sequence
  Description of Artificial Sequence: Synthetic epitope
PQLKSFQKIQ

SEQ ID NO: 33576 - protein, 10 aa, Artificial Sequence
  Description of Artificial Sequence: Synthetic epitope
PQLLAIMAEL

SEQ ID NO: 33577 - protein, 10 aa, Artificial Sequence
  Description of Artificial Sequence: Synthetic epitope
PQLNLKNVQR

SEQ ID NO: 33578 - protein, 10 aa, Artificial Sequence
  Description of Artificial Sequence: Synthetic epitope
PQLPKKSITN

SEQ ID NO: 33579 - protein, 10 aa, Artificial Sequence
  Description of Artificial Sequence: Synthetic epitope
PQLQKAGLSA

SEQ ID NO: 33580 - protein, 10 aa, Artificial Sequence
  Description of Artificial Sequence: Synthetic epitope
PQLRVTSAPP

SEQ ID NO: 33581 - protein, 10 aa, Artificial Sequence
  Description of Artificial Sequence: Synthetic epitope
PQLSAHALAA

SEQ ID NO: 33582 - protein, 10 aa, Artificial Sequence
  Description of Artificial Sequence: Synthetic epitope
PQLSQASRLS

SEQ ID NO: 33583 - protein, 10 aa, Artificial Sequence
  Description of Artificial Sequence: Synthetic epitope
PQLSYFEYRR

SEQ ID NO: 33584 - protein, 10 aa, Artificial Sequence
  Description of Artificial Sequence: Synthetic epitope
PQLTKHLSEN

SEQ ID NO: 33585 - protein, 10 aa, Artificial Sequence
  Description of Artificial Sequence: Synthetic epitope
PQLTTAILEI

SEQ ID NO: 33586 - protein, 10 aa, Artificial Sequence
  Description of Artificial Sequence: Synthetic epitope
PQLVGVSTPL

SEQ ID NO: 33587 - protein, 10 aa, Artificial Sequence
  Description of Artificial Sequence: Synthetic epitope
PQLWNAVDEE

SEQ ID NO: 33588 - protein, 10 aa, Artificial Sequence
  Description of Artificial Sequence: Synthetic epitope
PQLWQTIQTQ

SEQ ID NO: 33589 - protein, 10 aa, Artificial Sequence
  Description of Artificial Sequence: Synthetic epitope
PQMANRIVDS

SEQ ID NO: 33590 - protein, 10 aa, Artificial Sequence
  Description of Artificial Sequence: Synthetic epitope
PQMASSKNYG

SEQ ID NO: 33591 - protein, 10 aa, Artificial Sequence
  Description of Artificial Sequence: Synthetic epitope
PQMENTMPWK

SEQ ID NO: 33592 - protein, 10 aa, Artificial Sequence
  Description of Artificial Sequence: Synthetic epitope
PQMESSTNSS

SEQ ID NO: 33593 - protein, 10 aa, Artificial Sequence
  Description of Artificial Sequence: Synthetic epitope
PQMHSSAIPL

SEQ ID NO: 33594 - protein, 10 aa, Artificial Sequence
  Description of Artificial Sequence: Synthetic epitope
PQMKVNEYKE

SEQ ID NO: 33595 - protein, 10 aa, Artificial Sequence
  Description of Artificial Sequence: Synthetic epitope
PQMMGTLERS

SEQ ID NO: 33596 - protein, 10 aa, Artificial Sequence
  Description of Artificial Sequence: Synthetic epitope
PQMQKKSPKP

SEQ ID NO: 33597 - protein, 10 aa, Artificial Sequence
  Description of Artificial Sequence: Synthetic epitope
PQMRTMASGL

SEQ ID NO: 33598 - protein, 10 aa, Artificial Sequence
  Description of Artificial Sequence: Synthetic epitope
PQMVKAVQPQ

SEQ ID NO: 33599 - protein, 10 aa, Artificial Sequence
  Description of Artificial Sequence: Synthetic epitope
PQNASRKKSP

SEQ ID NO: 33600 - protein, 10 aa, Artificial Sequence
  Description of Artificial Sequence: Synthetic epitope
PQNDDHYVMQ

SEQ ID NO: 33601 - protein, 10 aa, Artificial Sequence
  Description of Artificial Sequence: Synthetic epitope
PQNLAMGAGA

SEQ ID NO: 33602 - protein, 10 aa, Artificial Sequence
  Description of Artificial Sequence: Synthetic epitope
PQNPLSGAQQ

SEQ ID NO: 33603 - protein, 10 aa, Artificial Sequence
  Description of Artificial Sequence: Synthetic epitope
PQNSESQAHV

SEQ ID NO: 33604 - protein, 10 aa, Artificial Sequence
  Description of Artificial Sequence: Synthetic epitope
PQNSSASDNI

SEQ ID NO: 33605 - protein, 10 aa, Artificial Sequence
  Description of Artificial Sequence: Synthetic epitope
PQNSVKLQTT

SEQ ID NO: 33606 - protein, 10 aa, Artificial Sequence
  Description of Artificial Sequence: Synthetic epitope
PQNTENQRPK

SEQ ID NO: 33607 - protein, 10 aa, Artificial Sequence
  Description of Artificial Sequence: Synthetic epitope
PQPQAQSQPP

SEQ ID NO: 33608 - protein, 10 aa, Artificial Sequence
  Description of Artificial Sequence: Synthetic epitope
PQPSPQKQIR

SEQ ID NO: 33609 - protein, 10 aa, Artificial Sequence
  Description of Artificial Sequence: Synthetic epitope
PQPSRHMSTM

SEQ ID NO: 33610 - protein, 10 aa, Artificial Sequence
  Description of Artificial Sequence: Synthetic epitope
PQPVDHKVPK

SEQ ID NO: 33611 - protein, 10 aa, Artificial Sequence
  Description of Artificial Sequence: Synthetic epitope
PQPVQTSSQQ

SEQ ID NO: 33612 - protein, 10 aa, Artificial Sequence
  Description of Artificial Sequence: Synthetic epitope
PQQALTQARL

SEQ ID NO: 33613 - protein, 10 aa, Artificial Sequence
  Description of Artificial Sequence: Synthetic epitope
PQQASKAEEN

SEQ ID NO: 33614 - protein, 10 aa, Artificial Sequence
  Description of Artificial Sequence: Synthetic epitope
PQQASQAPTA

SEQ ID NO: 33615 - protein, 10 aa, Artificial Sequence
  Description of Artificial Sequence: Synthetic epitope
PQQLGSAASA

SEQ ID NO: 33616 - protein, 10 aa, Artificial Sequence
  Description of Artificial Sequence: Synthetic epitope
PQQLSEASVA

SEQ ID NO: 33617 - protein, 10 aa, Artificial Sequence
  Description of Artificial Sequence: Synthetic epitope
PQQPSRPSNR

SEQ ID NO: 33618 - protein, 10 aa, Artificial Sequence
  Description of Artificial Sequence: Synthetic epitope
PQQPTQQSVV

SEQ ID NO: 33619 - protein, 10 aa, Artificial Sequence
  Description of Artificial Sequence: Synthetic epitope
PQQREMMDQA

SEQ ID NO: 33620 - protein, 10 aa, Artificial Sequence
  Description of Artificial Sequence: Synthetic epitope
PQQRRISQSQ

SEQ ID NO: 33621 - protein, 10 aa, Artificial Sequence
  Description of Artificial Sequence: Synthetic epitope
PQQRSQSEKQ

SEQ ID NO: 33622 - protein, 10 aa, Artificial Sequence
  Description of Artificial Sequence: Synthetic epitope
PQQSESLSPA

SEQ ID NO: 33623 - protein, 10 aa, Artificial Sequence
  Description of Artificial Sequence: Synthetic epitope
PQQSLKSYND

SEQ ID NO: 33624 - protein, 10 aa, Artificial Sequence
  Description of Artificial Sequence: Synthetic epitope
PQQTMSSIQD

SEQ ID NO: 33625 - protein, 10 aa, Artificial Sequence
  Description of Artificial Sequence: Synthetic epitope
PQQTVTRAET

SEQ ID NO: 33626 - protein, 10 aa, Artificial Sequence
  Description of Artificial Sequence: Synthetic epitope
PQQVDAELFL

SEQ ID NO: 33627 - protein, 10 aa, Artificial Sequence
  Description of Artificial Sequence: Synthetic epitope
PQRFAKSKQL

SEQ ID NO: 33628 - protein, 10 aa, Artificial Sequence
  Description of Artificial Sequence: Synthetic epitope
PQRISIEEQQ

SEQ ID NO: 33629 - protein, 10 aa, Artificial Sequence
  Description of Artificial Sequence: Synthetic epitope
PQRNFKQWPD

SEQ ID NO: 33630 - protein, 10 aa, Artificial Sequence
  Description of Artificial Sequence: Synthetic epitope
PQRQQATLGK

SEQ ID NO: 33631 - protein, 10 aa, Artificial Sequence
  Description of Artificial Sequence: Synthetic epitope
PQRSVKAERA

SEQ ID NO: 33632 - protein, 10 aa, Artificial Sequence
  Description of Artificial Sequence: Synthetic epitope
PQRTSSIATA

SEQ ID NO: 33633 - protein, 10 aa, Artificial Sequence
  Description of Artificial Sequence: Synthetic epitope
PQSATETASS

SEQ ID NO: 33634 - protein, 10 aa, Artificial Sequence
  Description of Artificial Sequence: Synthetic epitope
PQSATKQLDQ

SEQ ID NO: 33635 - protein, 10 aa, Artificial Sequence
  Description of Artificial Sequence: Synthetic epitope
PQSDQQESAP

SEQ ID NO: 33636 - protein, 10 aa, Artificial Sequence
  Description of Artificial Sequence: Synthetic epitope
PQSEAPLSVS

SEQ ID NO: 33637 - protein, 10 aa, Artificial Sequence
  Description of Artificial Sequence: Synthetic epitope
PQSEKSESTP

SEQ ID NO: 33638 - protein, 10 aa, Artificial Sequence
  Description of Artificial Sequence: Synthetic epitope
PQSGKSAVSR

SEQ ID NO: 33639 - protein, 10 aa, Artificial Sequence
  Description of Artificial Sequence: Synthetic epitope
PQSGSQSSVI

SEQ ID NO: 33640 - protein, 10 aa, Artificial Sequence
  Description of Artificial Sequence: Synthetic epitope
PQSHHQQHQS

SEQ ID NO: 33641 - protein, 10 aa, Artificial Sequence
  Description of Artificial Sequence: Synthetic epitope
PQSILTKSRS

SEQ ID NO: 33642 - protein, 10 aa, Artificial Sequence
  Description of Artificial Sequence: Synthetic epitope
PQSINTVSAH

SEQ ID NO: 33643 - protein, 10 aa, Artificial Sequence
  Description of Artificial Sequence: Synthetic epitope
PQSKLSVERK

SEQ ID NO: 33644 - protein, 10 aa, Artificial Sequence
  Description of Artificial Sequence: Synthetic epitope
PQSLQTSGHH

SEQ ID NO: 33645 - protein, 10 aa, Artificial Sequence
  Description of Artificial Sequence: Synthetic epitope
PQSNTTSSLK

SEQ ID NO: 33646 - protein, 10 aa, Artificial Sequence
  Description of Artificial Sequence: Synthetic epitope
PQSQAQPQTG

SEQ ID NO: 33647 - protein, 10 aa, Artificial Sequence
  Description of Artificial Sequence: Synthetic epitope
PQSQSLVSGQ

SEQ ID NO: 33648 - protein, 10 aa, Artificial Sequence
  Description of Artificial Sequence: Synthetic epitope
PQSRRLRELP

SEQ ID NO: 33649 - protein, 10 aa, Artificial Sequence
  Description of Artificial Sequence: Synthetic epitope
PQSRSKESSD

SEQ ID NO: 33650 - protein, 10 aa, Artificial Sequence
  Description of Artificial Sequence: Synthetic epitope
PQSSAKKESF

SEQ ID NO: 33651 - protein, 10 aa, Artificial Sequence
  Description of Artificial Sequence: Synthetic epitope
PQSSESDISD

SEQ ID NO: 33652 - protein, 10 aa, Artificial Sequence
  Description of Artificial Sequence: Synthetic epitope
PQSSQLSQET

SEQ ID NO: 33653 - protein, 10 aa, Artificial Sequence
  Description of Artificial Sequence: Synthetic epitope
PQSTFTPWAS

SEQ ID NO: 33654 - protein, 10 aa, Artificial Sequence
  Description of Artificial Sequence: Synthetic epitope
PQSTKKMKPA

SEQ ID NO: 33655 - protein, 10 aa, Artificial Sequence
  Description of Artificial Sequence: Synthetic epitope
PQSTSASRTS

SEQ ID NO: 33656 - protein, 10 aa, Artificial Sequence
  Description of Artificial Sequence: Synthetic epitope
PQSVSPRESY

SEQ ID NO: 33657 - protein, 10 aa, Artificial Sequence
  Description of Artificial Sequence: Synthetic epitope
PQSVSSVVHY

SEQ ID NO: 33658 - protein, 10 aa, Artificial Sequence
  Description of Artificial Sequence: Synthetic epitope
PQTAVTAGQT

SEQ ID NO: 33659 - protein, 10 aa, Artificial Sequence
  Description of Artificial Sequence: Synthetic epitope
PQTGKIAKDA

SEQ ID NO: 33660 - protein, 10 aa, Artificial Sequence
  Description of Artificial Sequence: Synthetic epitope
PQTMSVSTKV

SEQ ID NO: 33661 - protein, 10 aa, Artificial Sequence
  Description of Artificial Sequence: Synthetic epitope
PQTNTEIANY

SEQ ID NO: 33662 - protein, 10 aa, Artificial Sequence
  Description of Artificial Sequence: Synthetic epitope
PQTQESQPDS

SEQ ID NO: 33663 - protein, 10 aa, Artificial Sequence
  Description of Artificial Sequence: Synthetic epitope
PQTQTSYDAK

SEQ ID NO: 33664 - protein, 10 aa, Artificial Sequence
  Description of Artificial Sequence: Synthetic epitope
PQTRQAGQTR

SEQ ID NO: 33665 - protein, 10 aa, Artificial Sequence
  Description of Artificial Sequence: Synthetic epitope
PQTSQSGTSS

SEQ ID NO: 33666 - protein, 10 aa, Artificial Sequence
  Description of Artificial Sequence: Synthetic epitope
PQTTAVSKAP

SEQ ID NO: 33667 - protein, 10 aa, Artificial Sequence
  Description of Artificial Sequence: Synthetic epitope
PQTTEKISPN

SEQ ID NO: 33668 - protein, 10 aa, Artificial Sequence
  Description of Artificial Sequence: Synthetic epitope
PQTTFGVQTQ

SEQ ID NO: 33669 - protein, 10 aa, Artificial Sequence
  Description of Artificial Sequence: Synthetic epitope
PQTTIRKYVV

SEQ ID NO: 33670 - protein, 10 aa, Artificial Sequence
  Description of Artificial Sequence: Synthetic epitope
PQTTISKDQF

SEQ ID NO: 33671 - protein, 10 aa, Artificial Sequence
  Description of Artificial Sequence: Synthetic epitope
PQTTNINSSL

SEQ ID NO: 33672 - protein, 10 aa, Artificial Sequence
  Description of Artificial Sequence: Synthetic epitope
PQTTSSTLLV

SEQ ID NO: 33673 - protein, 10 aa, Artificial Sequence
  Description of Artificial Sequence: Synthetic epitope
PQVAAQSQPQ

SEQ ID NO: 33674 - protein, 10 aa, Artificial Sequence
  Description of Artificial Sequence: Synthetic epitope
PQVDSSLRRD

SEQ ID NO: 33675 - protein, 10 aa, Artificial Sequence
  Description of Artificial Sequence: Synthetic epitope
PQVHTMDSSG

SEQ ID NO: 33676 - protein, 10 aa, Artificial Sequence
  Description of Artificial Sequence: Synthetic epitope
PQVKANPQLF

SEQ ID NO: 33677 - protein, 10 aa, Artificial Sequence
  Description of Artificial Sequence: Synthetic epitope
PQVKTATIAT

SEQ ID NO: 33678 - protein, 10 aa, Artificial Sequence
  Description of Artificial Sequence: Synthetic epitope
PQVSAKAAEK

SEQ ID NO: 33679 - protein, 10 aa, Artificial Sequence
  Description of Artificial Sequence: Synthetic epitope
PQVTSVESKP

SEQ ID NO: 33680 - protein, 10 aa, Artificial Sequence
  Description of Artificial Sequence: Synthetic epitope
PQVVSAVSHQ

SEQ ID NO: 33681 - protein, 10 aa, Artificial Sequence
  Description of Artificial Sequence: Synthetic epitope
PQVVSQKGEG

SEQ ID NO: 33682 - protein, 10 aa, Artificial Sequence
  Description of Artificial Sequence: Synthetic epitope
PQWIIKKATV

SEQ ID NO: 33683 - protein, 10 aa, Artificial Sequence
  Description of Artificial Sequence: Synthetic epitope
PQYQALFSMD

SEQ ID NO: 33684 - protein, 10 aa, Artificial Sequence
  Description of Artificial Sequence: Synthetic epitope
PRAAEELLQR

SEQ ID NO: 33685 - protein, 10 aa, Artificial Sequence
  Description of Artificial Sequence: Synthetic epitope
PRAAMSASSE

SEQ ID NO: 33686 - protein, 10 aa, Artificial Sequence
  Description of Artificial Sequence: Synthetic epitope
PRAASKLDRD

SEQ ID NO: 33687 - protein, 10 aa, Artificial Sequence
  Description of Artificial Sequence: Synthetic epitope
PRAASRVSAV

SEQ ID NO: 33688 - protein, 10 aa, Artificial Sequence
  Description of Artificial Sequence: Synthetic epitope
PRAEMDVRNA

SEQ ID NO: 33689 - protein, 10 aa, Artificial Sequence
  Description of Artificial Sequence: Synthetic epitope
PRAISLTEGD

SEQ ID NO: 33690 - protein, 10 aa, Artificial Sequence
  Description of Artificial Sequence: Synthetic epitope
PRAKKGAEGK

SEQ ID NO: 33691 - protein, 10 aa, Artificial Sequence
  Description of Artificial Sequence: Synthetic epitope
PRALLVLMGR

SEQ ID NO: 33692 - protein, 10 aa, Artificial Sequence
  Description of Artificial Sequence: Synthetic epitope
PRAMSGRSPP

SEQ ID NO: 33693 - protein, 10 aa, Artificial Sequence
  Description of Artificial Sequence: Synthetic epitope
PRARNQANNP

SEQ ID NO: 33694 - protein, 10 aa, Artificial Sequence
  Description of Artificial Sequence: Synthetic epitope
PRARQAFSLS

SEQ ID NO: 33695 - protein, 10 aa, Artificial Sequence
  Description of Artificial Sequence: Synthetic epitope
PRARSAKANQ

SEQ ID NO: 33696 - protein, 10 aa, Artificial Sequence
  Description of Artificial Sequence: Synthetic epitope
PRAYMENKAF

SEQ ID NO: 33697 - protein, 10 aa, Artificial Sequence
  Description of Artificial Sequence: Synthetic epitope
PRAYSAERTA

SEQ ID NO: 33698 - protein, 10 aa, Artificial Sequence
  Description of Artificial Sequence: Synthetic epitope
PRDESRDEPP

SEQ ID NO: 33699 - protein, 10 aa, Artificial Sequence
  Description of Artificial Sequence: Synthetic epitope
PRDPIKAKLR

SEQ ID NO: 33700 - protein, 10 aa, Artificial Sequence
  Description of Artificial Sequence: Synthetic epitope
PREHETQQYE

SEQ ID NO: 33701 - protein, 10 aa, Artificial Sequence
  Description of Artificial Sequence: Synthetic epitope
PREIAKSPHS

SEQ ID NO: 33702 - protein, 10 aa, Artificial Sequence
  Description of Artificial Sequence: Synthetic epitope
PREIIMESSG

SEQ ID NO: 33703 - protein, 10 aa, Artificial Sequence
  Description of Artificial Sequence: Synthetic epitope
PREIIVEKSK

SEQ ID NO: 33704 - protein, 10 aa, Artificial Sequence
  Description of Artificial Sequence: Synthetic epitope
PREKFTAAEF

SEQ ID NO: 33705 - protein, 10 aa, Artificial Sequence
  Description of Artificial Sequence: Synthetic epitope
PREKVWVSDK

SEQ ID NO: 33706 - protein, 10 aa, Artificial Sequence
  Description of Artificial Sequence: Synthetic epitope
PRENEKPFID

SEQ ID NO: 33707 - protein, 10 aa, Artificial Sequence
  Description of Artificial Sequence: Synthetic epitope
PRESTHRFEG

SEQ ID NO: 33708 - protein, 10 aa, Artificial Sequence
  Description of Artificial Sequence: Synthetic epitope
PRETLAKNKK

SEQ ID NO: 33709 - protein, 10 aa, Artificial Sequence
  Description of Artificial Sequence: Synthetic epitope
PRETQYVDYD

SEQ ID NO: 33710 - protein, 10 aa, Artificial Sequence
  Description of Artificial Sequence: Synthetic epitope
PRETRRALAA

SEQ ID NO: 33711 - protein, 10 aa, Artificial Sequence
  Description of Artificial Sequence: Synthetic epitope
PRGGTRKIHK

SEQ ID NO: 33712 - protein, 10 aa, Artificial Sequence
  Description of Artificial Sequence: Synthetic epitope
PRGIDRLERT

SEQ ID NO: 33713 - protein, 10 aa, Artificial Sequence
  Description of Artificial Sequence: Synthetic epitope
PRGIKSLKGE

SEQ ID NO: 33714 - protein, 10 aa, Artificial Sequence
  Description of Artificial Sequence: Synthetic epitope
PRGLVSSLGK

SEQ ID NO: 33715 - protein, 10 aa, Artificial Sequence
  Description of Artificial Sequence: Synthetic epitope
PRGQNQRSQT

SEQ ID NO: 33716 - protein, 10 aa, Artificial Sequence
  Description of Artificial Sequence: Synthetic epitope
PRGQRTNAQK

SEQ ID NO: 33717 - protein, 10 aa, Artificial Sequence
  Description of Artificial Sequence: Synthetic epitope
PRGTASATKW

SEQ ID NO: 33718 - protein, 10 aa, Artificial Sequence
  Description of Artificial Sequence: Synthetic epitope
PRGTDQVRLD

SEQ ID NO: 33719 - protein, 10 aa, Artificial Sequence
  Description of Artificial Sequence: Synthetic epitope
PRGVAMLTSD

SEQ ID NO: 33720 - protein, 10 aa, Artificial Sequence
  Description of Artificial Sequence: Synthetic epitope
PRHHSWIAKV

SEQ ID NO: 33721 - protein, 10 aa, Artificial Sequence
  Description of Artificial Sequence: Synthetic epitope
PRHKSLNIKD

SEQ ID NO: 33722 - protein, 10 aa, Artificial Sequence
  Description of Artificial Sequence: Synthetic epitope
PRHQSSVKLR

SEQ ID NO: 33723 - protein, 10 aa, Artificial Sequence
  Description of Artificial Sequence: Synthetic epitope
PRHSSHLRVA

SEQ ID NO: 33724 - protein, 10 aa, Artificial Sequence
  Description of Artificial Sequence: Synthetic epitope
PRIGMDALQI

SEQ ID NO: 33725 - protein, 10 aa, Artificial Sequence
  Description of Artificial Sequence: Synthetic epitope
PRINDSQEGG

SEQ ID NO: 33726 - protein, 10 aa, Artificial Sequence
  Description of Artificial Sequence: Synthetic epitope
PRINEEAGDT

SEQ ID NO: 33727 - protein, 10 aa, Artificial Sequence
  Description of Artificial Sequence: Synthetic epitope
PRIQEQFQKN

SEQ ID NO: 33728 - protein, 10 aa, Artificial Sequence
  Description of Artificial Sequence: Synthetic epitope
PRIQSQRYQV

SEQ ID NO: 33729 - protein, 10 aa, Artificial Sequence
  Description of Artificial Sequence: Synthetic epitope
PRIQTDILKQ

SEQ ID NO: 33730 - protein, 10 aa, Artificial Sequence
  Description of Artificial Sequence: Synthetic epitope
PRISLAEMLE

SEQ ID NO: 33731 - protein, 10 aa, Artificial Sequence
  Description of Artificial Sequence: Synthetic epitope
PRISVNNVLP

SEQ ID NO: 33732 - protein, 10 aa, Artificial Sequence
  Description of Artificial Sequence: Synthetic epitope
PRKAHSKSAK

SEQ ID NO: 33733 - protein, 10 aa, Artificial Sequence
  Description of Artificial Sequence: Synthetic epitope
PRKATKTKKN

SEQ ID NO: 33734 - protein, 10 aa, Artificial Sequence
  Description of Artificial Sequence: Synthetic epitope
PRKEKHIEPE

SEQ ID NO: 33735 - protein, 10 aa, Artificial Sequence
  Description of Artificial Sequence: Synthetic epitope
PRKERETAQS

SEQ ID NO: 33736 - protein, 10 aa, Artificial Sequence
  Description of Artificial Sequence: Synthetic epitope
PRKESAVKQE

SEQ ID NO: 33737 - protein, 10 aa, Artificial Sequence
  Description of Artificial Sequence: Synthetic epitope
PRKFKMRQFN

SEQ ID NO: 33738 - protein, 10 aa, Artificial Sequence
  Description of Artificial Sequence: Synthetic epitope
PRKKAQGKTQ

SEQ ID NO: 33739 - protein, 10 aa, Artificial Sequence
  Description of Artificial Sequence: Synthetic epitope
PRKKVSQKQS

SEQ ID NO: 33740 - protein, 10 aa, Artificial Sequence
  Description of Artificial Sequence: Synthetic epitope
PRKRSSRHRG

SEQ ID NO: 33741 - protein, 10 aa, Artificial Sequence
  Description of Artificial Sequence: Synthetic epitope
PRKSKLAVHR

SEQ ID NO: 33742 - protein, 10 aa, Artificial Sequence
  Description of Artificial Sequence: Synthetic epitope
PRKSQATKLK

SEQ ID NO: 33743 - protein, 10 aa, Artificial Sequence
  Description of Artificial Sequence: Synthetic epitope
PRKSRTAKPL

SEQ ID NO: 33744 - protein, 10 aa, Artificial Sequence
  Description of Artificial Sequence: Synthetic epitope
PRKTAGNRLS

SEQ ID NO: 33745 - protein, 10 aa, Artificial Sequence
  Description of Artificial Sequence: Synthetic epitope
PRKTAQDTLY

SEQ ID NO: 33746 - protein, 10 aa, Artificial Sequence
  Description of Artificial Sequence: Synthetic epitope
PRKTASQLSE

SEQ ID NO: 33747 - protein, 10 aa, Artificial Sequence
  Description of Artificial Sequence: Synthetic epitope
PRKTIRGKHS

SEQ ID NO: 33748 - protein, 10 aa, Artificial Sequence
  Description of Artificial Sequence: Synthetic epitope
PRKTSAMTRR

SEQ ID NO: 33749 - protein, 10 aa, Artificial Sequence
  Description of Artificial Sequence: Synthetic epitope
PRKVLVEQTK

SEQ ID NO: 33750 - protein, 10 aa, Artificial Sequence
  Description of Artificial Sequence: Synthetic epitope
PRLAMLQNEL

SEQ ID NO: 33751 - protein, 10 aa, Artificial Sequence
  Description of Artificial Sequence: Synthetic epitope
PRLAQLSEVA

SEQ ID NO: 33752 - protein, 10 aa, Artificial Sequence
  Description of Artificial Sequence: Synthetic epitope
PRLASASHPE

SEQ ID NO: 33753 - protein, 10 aa, Artificial Sequence
  Description of Artificial Sequence: Synthetic epitope
PRLASASRSN

SEQ ID NO: 33754 - protein, 10 aa, Artificial Sequence
  Description of Artificial Sequence: Synthetic epitope
PRLDQSRTWL

SEQ ID NO: 33755 - protein, 10 aa, Artificial Sequence
  Description of Artificial Sequence: Synthetic epitope
PRLEKTNMSI

SEQ ID NO: 33756 - protein, 10 aa, Artificial Sequence
  Description of Artificial Sequence: Synthetic epitope
PRLEMQMLMP

SEQ ID NO: 33757 - protein, 10 aa, Artificial Sequence
  Description of Artificial Sequence: Synthetic epitope
PRLKAKHIEP

SEQ ID NO: 33758 - protein, 10 aa, Artificial Sequence
  Description of Artificial Sequence: Synthetic epitope
PRLKSVGIPV

SEQ ID NO: 33759 - protein, 10 aa, Artificial Sequence
  Description of Artificial Sequence: Synthetic epitope
PRLMTSKPAE

SEQ ID NO: 33760 - protein, 10 aa, Artificial Sequence
  Description of Artificial Sequence: Synthetic epitope
PRLNKENEQQ

SEQ ID NO: 33761 - protein, 10 aa, Artificial Sequence
  Description of Artificial Sequence: Synthetic epitope
PRLNNTKEEK

SEQ ID NO: 33762 - protein, 10 aa, Artificial Sequence
  Description of Artificial Sequence: Synthetic epitope
PRLPISASHS

SEQ ID NO: 33763 - protein, 10 aa, Artificial Sequence
  Description of Artificial Sequence: Synthetic epitope
PRLPLASMDE

SEQ ID NO: 33764 - protein, 10 aa, Artificial Sequence
  Description of Artificial Sequence: Synthetic epitope
PRLPNKTISG

SEQ ID NO: 33765 - protein, 10 aa, Artificial Sequence
  Description of Artificial Sequence: Synthetic epitope
PRLPTVLESE

SEQ ID NO: 33766 - protein, 10 aa, Artificial Sequence
  Description of Artificial Sequence: Synthetic epitope
PRLRSADDPQ

SEQ ID NO: 33767 - protein, 10 aa, Artificial Sequence
  Description of Artificial Sequence: Synthetic epitope
PRLSAVEVEA

SEQ ID NO: 33768 - protein, 10 aa, Artificial Sequence
  Description of Artificial Sequence: Synthetic epitope
PRLSKDAYSE

SEQ ID NO: 33769 - protein, 10 aa, Artificial Sequence
  Description of Artificial Sequence: Synthetic epitope
PRLSKEVEAV

SEQ ID NO: 33770 - protein, 10 aa, Artificial Sequence
  Description of Artificial Sequence: Synthetic epitope
PRLSSEAVSV

SEQ ID NO: 33771 - protein, 10 aa, Artificial Sequence
  Description of Artificial Sequence: Synthetic epitope
PRLSSIQEED

SEQ ID NO: 33772 - protein, 10 aa, Artificial Sequence
  Description of Artificial Sequence: Synthetic epitope
PRLTKERAKL

SEQ ID NO: 33773 - protein, 10 aa, Artificial Sequence
  Description of Artificial Sequence: Synthetic epitope
PRLTVKAREH

SEQ ID NO: 33774 - protein, 10 aa, Artificial Sequence
  Description of Artificial Sequence: Synthetic epitope
PRLVMSIRDG

SEQ ID NO: 33775 - protein, 10 aa, Artificial Sequence
  Description of Artificial Sequence: Synthetic epitope
PRLVTLRKKV

SEQ ID NO: 33776 - protein, 10 aa, Artificial Sequence
  Description of Artificial Sequence: Synthetic epitope
PRNQQKNKKA

SEQ ID NO: 33777 - protein, 10 aa, Artificial Sequence
  Description of Artificial Sequence: Synthetic epitope
PRPALRSDSD

SEQ ID NO: 33778 - protein, 10 aa, Artificial Sequence
  Description of Artificial Sequence: Synthetic epitope
PRPEIANQPS

SEQ ID NO: 33779 - protein, 10 aa, Artificial Sequence
  Description of Artificial Sequence: Synthetic epitope
PRPLAALKPV

SEQ ID NO: 33780 - protein, 10 aa, Artificial Sequence
  Description of Artificial Sequence: Synthetic epitope
PRPQKTHSRA

SEQ ID NO: 33781 - protein, 10 aa, Artificial Sequence
  Description of Artificial Sequence: Synthetic epitope
PRPSHMDYGN

SEQ ID NO: 33782 - protein, 10 aa, Artificial Sequence
  Description of Artificial Sequence: Synthetic epitope
PRPSTVSGSR

SEQ ID NO: 33783 - protein, 10 aa, Artificial Sequence
  Description of Artificial Sequence: Synthetic epitope
PRQAGHGGTA

SEQ ID NO: 33784 - protein, 10 aa, Artificial Sequence
  Description of Artificial Sequence: Synthetic epitope
PRQMQVSSVD

SEQ ID NO: 33785 - protein, 10 aa, Artificial Sequence
  Description of Artificial Sequence: Synthetic epitope
PRQNKSKSEI

SEQ ID NO: 33786 - protein, 10 aa, Artificial Sequence
  Description of Artificial Sequence: Synthetic epitope
PRQQSTSSDR

SEQ ID NO: 33787 - protein, 10 aa, Artificial Sequence
  Description of Artificial Sequence: Synthetic epitope
PRQSFNMHDS

SEQ ID NO: 33788 - protein, 10 aa, Artificial Sequence
  Description of Artificial Sequence: Synthetic epitope
PRQSTLSYQE

SEQ ID NO: 33789 - protein, 10 aa, Artificial Sequence
  Description of Artificial Sequence: Synthetic epitope
PRQVAEARSR

SEQ ID NO: 33790 - protein, 10 aa, Artificial Sequence
  Description of Artificial Sequence: Synthetic epitope
PRRASTVATS

SEQ ID NO: 33791 - protein, 10 aa, Artificial Sequence
  Description of Artificial Sequence: Synthetic epitope
PRRDSLSKTS

SEQ ID NO: 33792 - protein, 10 aa, Artificial Sequence
  Description of Artificial Sequence: Synthetic epitope
PRRIKLTAPN

SEQ ID NO: 33793 - protein, 10 aa, Artificial Sequence
  Description of Artificial Sequence: Synthetic epitope
PRRKSRQNAE

SEQ ID NO: 33794 - protein, 10 aa, Artificial Sequence
  Description of Artificial Sequence: Synthetic epitope
PRRLLISKRL

SEQ ID NO: 33795 - protein, 10 aa, Artificial Sequence
  Description of Artificial Sequence: Synthetic epitope
PRRMKDSYIE

SEQ ID NO: 33796 - protein, 10 aa, Artificial Sequence
  Description of Artificial Sequence: Synthetic epitope
PRRMMTRSQD

SEQ ID NO: 33797 - protein, 10 aa, Artificial Sequence
  Description of Artificial Sequence: Synthetic epitope
PRRMTSKYVE

SEQ ID NO: 33798 - protein, 10 aa, Artificial Sequence
  Description of Artificial Sequence: Synthetic epitope
PRRNSLILKP

SEQ ID NO: 33799 - protein, 10 aa, Artificial Sequence
  Description of Artificial Sequence: Synthetic epitope
PRRSLARDPL

SEQ ID NO: 33800 - protein, 10 aa, Artificial Sequence
  Description of Artificial Sequence: Synthetic epitope
PRRSSLNLPS

SEQ ID NO: 33801 - protein, 10 aa, Artificial Sequence
  Description of Artificial Sequence: Synthetic epitope
PRRTETRDLR

SEQ ID NO: 33802 - protein, 10 aa, Artificial Sequence
  Description of Artificial Sequence: Synthetic epitope
PRRVTSRAKG

SEQ ID NO: 33803 - protein, 10 aa, Artificial Sequence
  Description of Artificial Sequence: Synthetic epitope
PRSALSAIVN

SEQ ID NO: 33804 - protein, 10 aa, Artificial Sequence
  Description of Artificial Sequence: Synthetic epitope
PRSDQLLFDQ

SEQ ID NO: 33805 - protein, 10 aa, Artificial Sequence
  Description of Artificial Sequence: Synthetic epitope
PRSDSVAILE

SEQ ID NO: 33806 - protein, 10 aa, Artificial Sequence
  Description of Artificial Sequence: Synthetic epitope
PRSEEAVVTA

SEQ ID NO: 33807 - protein, 10 aa, Artificial Sequence
  Description of Artificial Sequence: Synthetic epitope
PRSISETGDE

SEQ ID NO: 33808 - protein, 10 aa, Artificial Sequence
  Description of Artificial Sequence: Synthetic epitope
PRSKAKSRLS

SEQ ID NO: 33809 - protein, 10 aa, Artificial Sequence
  Description of Artificial Sequence: Synthetic epitope
PRSKRLEIEK

SEQ ID NO: 33810 - protein, 10 aa, Artificial Sequence
  Description of Artificial Sequence: Synthetic epitope
PRSMTRFYAN

SEQ ID NO: 33811 - protein, 10 aa, Artificial Sequence
  Description of Artificial Sequence: Synthetic epitope
PRSPYKFPSS

SEQ ID NO: 33812 - protein, 10 aa, Artificial Sequence
  Description of Artificial Sequence: Synthetic epitope
PRSQKQLELK

SEQ ID NO: 33813 - protein, 10 aa, Artificial Sequence
  Description of Artificial Sequence: Synthetic epitope
PRSRTEVNRQ

SEQ ID NO: 33814 - protein, 10 aa, Artificial Sequence
  Description of Artificial Sequence: Synthetic epitope
PRSSRLLTFN

SEQ ID NO: 33815 - protein, 10 aa, Artificial Sequence
  Description of Artificial Sequence: Synthetic epitope
PRSTLRMMET

SEQ ID NO: 33816 - protein, 10 aa, Artificial Sequence
  Description of Artificial Sequence: Synthetic epitope
PRSTRETSEE

SEQ ID NO: 33817 - protein, 10 aa, Artificial Sequence
  Description of Artificial Sequence: Synthetic epitope
PRSVLNTQPE

SEQ ID NO: 33818 - protein, 10 aa, Artificial Sequence
  Description of Artificial Sequence: Synthetic epitope
PRSYNASRRS

SEQ ID NO: 33819 - protein, 10 aa, Artificial Sequence
  Description of Artificial Sequence: Synthetic epitope
PRSYRKTDTV

SEQ ID NO: 33820 - protein, 10 aa, Artificial Sequence
  Description of Artificial Sequence: Synthetic epitope
PRTADQDTST

SEQ ID NO: 33821 - protein, 10 aa, Artificial Sequence
  Description of Artificial Sequence: Synthetic epitope
PRTIVMEVME

SEQ ID NO: 33822 - protein, 10 aa, Artificial Sequence
  Description of Artificial Sequence: Synthetic epitope
PRTLSTRSTA

SEQ ID NO: 33823 - protein, 10 aa, Artificial Sequence
  Description of Artificial Sequence: Synthetic epitope
PRTLVELSKL

SEQ ID NO: 33824 - protein, 10 aa, Artificial Sequence
  Description of Artificial Sequence: Synthetic epitope
PRTSKTIKRK

SEQ ID NO: 33825 - protein, 10 aa, Artificial Sequence
  Description of Artificial Sequence: Synthetic epitope
PRTTQLQERK

SEQ ID NO: 33826 - protein, 10 aa, Artificial Sequence
  Description of Artificial Sequence: Synthetic epitope
PRVERIHGQM

SEQ ID NO: 33827 - protein, 10 aa, Artificial Sequence
  Description of Artificial Sequence: Synthetic epitope
PRVFAKLSDQ

SEQ ID NO: 33828 - protein, 10 aa, Artificial Sequence
  Description of Artificial Sequence: Synthetic epitope
PRVLKDKSRD

SEQ ID NO: 33829 - protein, 10 aa, Artificial Sequence
  Description of Artificial Sequence: Synthetic epitope
PRVLLTELQP

SEQ ID NO: 33830 - protein, 10 aa, Artificial Sequence
  Description of Artificial Sequence: Synthetic epitope
PRVQQRVQTR

SEQ ID NO: 33831 - protein, 10 aa, Artificial Sequence
  Description of Artificial Sequence: Synthetic epitope
PRVTLHELSQ

SEQ ID NO: 33832 - protein, 10 aa, Artificial Sequence
  Description of Artificial Sequence: Synthetic epitope
PRVVIQLERG

SEQ ID NO: 33833 - protein, 10 aa, Artificial Sequence
  Description of Artificial Sequence: Synthetic epitope
PRVVQAQRGP

SEQ ID NO: 33834 - protein, 10 aa, Artificial Sequence
  Description of Artificial Sequence: Synthetic epitope
PRVYGTIKPA

SEQ ID NO: 33835 - protein, 10 aa, Artificial Sequence
  Description of Artificial Sequence: Synthetic epitope
PRYIPQKQSE

SEQ ID NO: 33836 - protein, 10 aa, Artificial Sequence
  Description of Artificial Sequence: Synthetic epitope
PRYIYTTKTL

SEQ ID NO: 33837 - protein, 10 aa, Artificial Sequence
  Description of Artificial Sequence: Synthetic epitope
PRYLELLERT

SEQ ID NO: 33838 - protein, 10 aa, Artificial Sequence
  Description of Artificial Sequence: Synthetic epitope
PRYQSMRRDV

SEQ ID NO: 33839 - protein, 10 aa, Artificial Sequence
  Description of Artificial Sequence: Synthetic epitope
PRYSESSGTQ

SEQ ID NO: 33840 - protein, 10 aa, Artificial Sequence
  Description of Artificial Sequence: Synthetic epitope
PSAAEINQAA

SEQ ID NO: 33841 - protein, 10 aa, Artificial Sequence
  Description of Artificial Sequence: Synthetic epitope
PSAARSASAR

SEQ ID NO: 33842 - protein, 10 aa, Artificial Sequence
  Description of Artificial Sequence: Synthetic epitope
PSAASQMKRT

SEQ ID NO: 33843 - protein, 10 aa, Artificial Sequence
  Description of Artificial Sequence: Synthetic epitope
PSAAVSQDLA

SEQ ID NO: 33844 - protein, 10 aa, Artificial Sequence
  Description of Artificial Sequence: Synthetic epitope
PSAEKTSSTD

SEQ ID NO: 33845 - protein, 10 aa, Artificial Sequence
  Description of Artificial Sequence: Synthetic epitope
PSAEQSSHID

SEQ ID NO: 33846 - protein, 10 aa, Artificial Sequence
  Description of Artificial Sequence: Synthetic epitope
PSAESVDQVT

SEQ ID NO: 33847 - protein, 10 aa, Artificial Sequence
  Description of Artificial Sequence: Synthetic epitope
PSAGQMQMQH

SEQ ID NO: 33848 - protein, 10 aa, Artificial Sequence
  Description of Artificial Sequence: Synthetic epitope
PSAILQTSGV

SEQ ID NO: 33849 - protein, 10 aa, Artificial Sequence
  Description of Artificial Sequence: Synthetic epitope
PSAIQSETEQ

SEQ ID NO: 33850 - protein, 10 aa, Artificial Sequence
  Description of Artificial Sequence: Synthetic epitope
PSAITLNRQK

SEQ ID NO: 33851 - protein, 10 aa, Artificial Sequence
  Description of Artificial Sequence: Synthetic epitope
PSAKKEDTLE

SEQ ID NO: 33852 - protein, 10 aa, Artificial Sequence
  Description of Artificial Sequence: Synthetic epitope
PSAKNLAQRY

SEQ ID NO: 33853 - protein, 10 aa, Artificial Sequence
  Description of Artificial Sequence: Synthetic epitope
PSAKVSLKEY

SEQ ID NO: 33854 - protein, 10 aa, Artificial Sequence
  Description of Artificial Sequence: Synthetic epitope
PSALSLHSKL

SEQ ID NO: 33855 - protein, 10 aa, Artificial Sequence
  Description of Artificial Sequence: Synthetic epitope
PSALTNSSAS

SEQ ID NO: 33856 - protein, 10 aa, Artificial Sequence
  Description of Artificial Sequence: Synthetic epitope
PSANPQNMID

SEQ ID NO: 33857 - protein, 10 aa, Artificial Sequence
  Description of Artificial Sequence: Synthetic epitope
PSANVPQSSA

SEQ ID NO: 33858 - protein, 10 aa, Artificial Sequence
  Description of Artificial Sequence: Synthetic epitope
PSAPAATSSA

SEQ ID NO: 33859 - protein, 10 aa, Artificial Sequence
  Description of Artificial Sequence: Synthetic epitope
PSAQIGAERK

SEQ ID NO: 33860 - protein, 10 aa, Artificial Sequence
  Description of Artificial Sequence: Synthetic epitope
PSARDQVTYQ

SEQ ID NO: 33861 - protein, 10 aa, Artificial Sequence
  Description of Artificial Sequence: Synthetic epitope
PSARSASQGA

SEQ ID NO: 33862 - protein, 10 aa, Artificial Sequence
  Description of Artificial Sequence: Synthetic epitope
PSASLESVDD

SEQ ID NO: 33863 - protein, 10 aa, Artificial Sequence
  Description of Artificial Sequence: Synthetic epitope
PSASLKGPTS

SEQ ID NO: 33864 - protein, 10 aa, Artificial Sequence
  Description of Artificial Sequence: Synthetic epitope
PSASNSKSIK

SEQ ID NO: 33865 - protein, 10 aa, Artificial Sequence
  Description of Artificial Sequence: Synthetic epitope
PSASQKAGEN

SEQ ID NO: 33866 - protein, 10 aa, Artificial Sequence
  Description of Artificial Sequence: Synthetic epitope
PSASSASTVP

SEQ ID NO: 33867 - protein, 10 aa, Artificial Sequence
  Description of Artificial Sequence: Synthetic epitope
PSASSEQMRT

SEQ ID NO: 33868 - protein, 10 aa, Artificial Sequence
  Description of Artificial Sequence: Synthetic epitope
PSASTAQTAQ

SEQ ID NO: 33869 - protein, 10 aa, Artificial Sequence
  Description of Artificial Sequence: Synthetic epitope
PSASVTASVL

SEQ ID NO: 33870 - protein, 10 aa, Artificial Sequence
  Description of Artificial Sequence: Synthetic epitope
PSASVVQTAN

SEQ ID NO: 33871 - protein, 10 aa, Artificial Sequence
  Description of Artificial Sequence: Synthetic epitope
PSATLASAAS

SEQ ID NO: 33872 - protein, 10 aa, Artificial Sequence
  Description of Artificial Sequence: Synthetic epitope
PSATQPATAE

SEQ ID NO: 33873 - protein, 10 aa, Artificial Sequence
  Description of Artificial Sequence: Synthetic epitope
PSATQSPISK

SEQ ID NO: 33874 - protein, 10 aa, Artificial Sequence
  Description of Artificial Sequence: Synthetic epitope
PSATSQSNQV

SEQ ID NO: 33875 - protein, 10 aa, Artificial Sequence
  Description of Artificial Sequence: Synthetic epitope
PSAVAVVDEY

SEQ ID NO: 33876 - protein, 10 aa, Artificial Sequence
  Description of Artificial Sequence: Synthetic epitope
PSAVSSAAPA

SEQ ID NO: 33877 - protein, 10 aa, Artificial Sequence
  Description of Artificial Sequence: Synthetic epitope
PSAYSAHSAP

SEQ ID NO: 33878 - protein, 10 aa, Artificial Sequence
  Description of Artificial Sequence: Synthetic epitope
PSDASTSSFP

SEQ ID NO: 33879 - protein, 10 aa, Artificial Sequence
  Description of Artificial Sequence: Synthetic epitope
PSDNSKDNST

SEQ ID NO: 33880 - protein, 10 aa, Artificial Sequence
  Description of Artificial Sequence: Synthetic epitope
PSDQTTAEKQ

SEQ ID NO: 33881 - protein, 10 aa, Artificial Sequence
  Description of Artificial Sequence: Synthetic epitope
PSDQVQKKII

SEQ ID NO: 33882 - protein, 10 aa, Artificial Sequence
  Description of Artificial Sequence: Synthetic epitope
PSDSQLDSKE

SEQ ID NO: 33883 - protein, 10 aa, Artificial Sequence
  Description of Artificial Sequence: Synthetic epitope
PSDSQVSEEV

SEQ ID NO: 33884 - protein, 10 aa, Artificial Sequence
  Description of Artificial Sequence: Synthetic epitope
PSDSSKTSEL

SEQ ID NO: 33885 - protein, 10 aa, Artificial Sequence
  Description of Artificial Sequence: Synthetic epitope
PSEAAMPLQA

SEQ ID NO: 33886 - protein, 10 aa, Artificial Sequence
  Description of Artificial Sequence: Synthetic epitope
PSEAEAETAR

SEQ ID NO: 33887 - protein, 10 aa, Artificial Sequence
  Description of Artificial Sequence: Synthetic epitope
PSEAIEKLVA

SEQ ID NO: 33888 - protein, 10 aa, Artificial Sequence
  Description of Artificial Sequence: Synthetic epitope
PSEAQSVILR

SEQ ID NO: 33889 - protein, 10 aa, Artificial Sequence
  Description of Artificial Sequence: Synthetic epitope
PSEDVSSVDP

SEQ ID NO: 33890 - protein, 10 aa, Artificial Sequence
  Description of Artificial Sequence: Synthetic epitope
PSEELALNEL

SEQ ID NO: 33891 - protein, 10 aa, Artificial Sequence
  Description of Artificial Sequence: Synthetic epitope
PSEELALNEL

SEQ ID NO: 33892 - protein, 10 aa, Artificial Sequence
  Description of Artificial Sequence: Synthetic epitope
PSEENNLVGT

SEQ ID NO: 33893 - protein, 10 aa, Artificial Sequence
  Description of Artificial Sequence: Synthetic epitope
PSEESHVHQE

SEQ ID NO: 33894 - protein, 10 aa, Artificial Sequence
  Description of Artificial Sequence: Synthetic epitope
PSEKAKEQQA

SEQ ID NO: 33895 - protein, 10 aa, Artificial Sequence
  Description of Artificial Sequence: Synthetic epitope
PSEKILMQDH

SEQ ID NO: 33896 - protein, 10 aa, Artificial Sequence
  Description of Artificial Sequence: Synthetic epitope
PSEKLSRIVE

SEQ ID NO: 33897 - protein, 10 aa, Artificial Sequence
  Description of Artificial Sequence: Synthetic epitope
PSEKTSSAKQ

SEQ ID NO: 33898 - protein, 10 aa, Artificial Sequence
  Description of Artificial Sequence: Synthetic epitope
PSERSKPLSS

SEQ ID NO: 33899 - protein, 10 aa, Artificial Sequence
  Description of Artificial Sequence: Synthetic epitope
PSESKKEDSS

SEQ ID NO: 33900 - protein, 10 aa, Artificial Sequence
  Description of Artificial Sequence: Synthetic epitope
PSESKKEILS

SEQ ID NO: 33901 - protein, 10 aa, Artificial Sequence
  Description of Artificial Sequence: Synthetic epitope
PSESLNKFEP

SEQ ID NO: 33902 - protein, 10 aa, Artificial Sequence
  Description of Artificial Sequence: Synthetic epitope
PSESLQSRGQ

SEQ ID NO: 33903 - protein, 10 aa, Artificial Sequence
  Description of Artificial Sequence: Synthetic epitope
PSESRSGSNP

SEQ ID NO: 33904 - protein, 10 aa, Artificial Sequence
  Description of Artificial Sequence: Synthetic epitope
PSESTAEDDI

SEQ ID NO: 33905 - protein, 10 aa, Artificial Sequence
  Description of Artificial Sequence: Synthetic epitope
PSESTILAVQ

SEQ ID NO: 33906 - protein, 10 aa, Artificial Sequence
  Description of Artificial Sequence: Synthetic epitope
PSESVAMISR

SEQ ID NO: 33907 - protein, 10 aa, Artificial Sequence
  Description of Artificial Sequence: Synthetic epitope
PSETKEVEPE

SEQ ID NO: 33908 - protein, 10 aa, Artificial Sequence
  Description of Artificial Sequence: Synthetic epitope
PSETSASGAA

SEQ ID NO: 33909 - protein, 10 aa, Artificial Sequence
  Description of Artificial Sequence: Synthetic epitope
PSETSSTTNR

SEQ ID NO: 33910 - protein, 10 aa, Artificial Sequence
  Description of Artificial Sequence: Synthetic epitope
PSETVSSTES

SEQ ID NO: 33911 - protein, 10 aa, Artificial Sequence
  Description of Artificial Sequence: Synthetic epitope
PSFAASLKMG

SEQ ID NO: 33912 - protein, 10 aa, Artificial Sequence
  Description of Artificial Sequence: Synthetic epitope
PSFAHINTDM

SEQ ID NO: 33913 - protein, 10 aa, Artificial Sequence
  Description of Artificial Sequence: Synthetic epitope
PSFKKELISA

SEQ ID NO: 33914 - protein, 10 aa, Artificial Sequence
  Description of Artificial Sequence: Synthetic epitope
PSFKVKRKEP

SEQ ID NO: 33915 - protein, 10 aa, Artificial Sequence
  Description of Artificial Sequence: Synthetic epitope
PSFLSLRKGA

SEQ ID NO: 33916 - protein, 10 aa, Artificial Sequence
  Description of Artificial Sequence: Synthetic epitope
PSFVSTKAEM

SEQ ID NO: 33917 - protein, 10 aa, Artificial Sequence
  Description of Artificial Sequence: Synthetic epitope
PSGAESSKGA

SEQ ID NO: 33918 - protein, 10 aa, Artificial Sequence
  Description of Artificial Sequence: Synthetic epitope
PSGAILSLPK

SEQ ID NO: 33919 - protein, 10 aa, Artificial Sequence
  Description of Artificial Sequence: Synthetic epitope
PSGAQQGDAA

SEQ ID NO: 33920 - protein, 10 aa, Artificial Sequence
  Description of Artificial Sequence: Synthetic epitope
PSGASTSAAV

SEQ ID NO: 33921 - protein, 10 aa, Artificial Sequence
  Description of Artificial Sequence: Synthetic epitope
PSGEVNTNVA

SEQ ID NO: 33922 - protein, 10 aa, Artificial Sequence
  Description of Artificial Sequence: Synthetic epitope
PSGGESLSSA

SEQ ID NO: 33923 - protein, 10 aa, Artificial Sequence
  Description of Artificial Sequence: Synthetic epitope
PSGGTSLSKT

SEQ ID NO: 33924 - protein, 10 aa, Artificial Sequence
  Description of Artificial Sequence: Synthetic epitope
PSGIELASFG

SEQ ID NO: 33925 - protein, 10 aa, Artificial Sequence
  Description of Artificial Sequence: Synthetic epitope
PSGISEKSKS

SEQ ID NO: 33926 - protein, 10 aa, Artificial Sequence
  Description of Artificial Sequence: Synthetic epitope
PSGKSSQRKS

SEQ ID NO: 33927 - protein, 10 aa, Artificial Sequence
  Description of Artificial Sequence: Synthetic epitope
PSGLKIQTGK

SEQ ID NO: 33928 - protein, 10 aa, Artificial Sequence
  Description of Artificial Sequence: Synthetic epitope
PSGQTELSQE

SEQ ID NO: 33929 - protein, 10 aa, Artificial Sequence
  Description of Artificial Sequence: Synthetic epitope
PSGSESSMEQ

SEQ ID NO: 33930 - protein, 10 aa, Artificial Sequence
  Description of Artificial Sequence: Synthetic epitope
PSGSLESAST

SEQ ID NO: 33931 - protein, 10 aa, Artificial Sequence
  Description of Artificial Sequence: Synthetic epitope
PSGSQADIPL

SEQ ID NO: 33932 - protein, 10 aa, Artificial Sequence
  Description of Artificial Sequence: Synthetic epitope
PSGTSSVETQ

SEQ ID NO: 33933 - protein, 10 aa, Artificial Sequence
  Description of Artificial Sequence: Synthetic epitope
PSHKKSIEVQ

SEQ ID NO: 33934 - protein, 10 aa, Artificial Sequence
  Description of Artificial Sequence: Synthetic epitope
PSHQANLASS

SEQ ID NO: 33935 - protein, 10 aa, Artificial Sequence
  Description of Artificial Sequence: Synthetic epitope
PSHQEYRLPV

SEQ ID NO: 33936 - protein, 10 aa, Artificial Sequence
  Description of Artificial Sequence: Synthetic epitope
PSHRHQEKLH

SEQ ID NO: 33937 - protein, 10 aa, Artificial Sequence
  Description of Artificial Sequence: Synthetic epitope
PSHSATSVHT

SEQ ID NO: 33938 - protein, 10 aa, Artificial Sequence
  Description of Artificial Sequence: Synthetic epitope
PSHSDSLASQ

SEQ ID NO: 33939 - protein, 10 aa, Artificial Sequence
  Description of Artificial Sequence: Synthetic epitope
PSHSSELTEQ

SEQ ID NO: 33940 - protein, 10 aa, Artificial Sequence
  Description of Artificial Sequence: Synthetic epitope
PSHSSVISQH

SEQ ID NO: 33941 - protein, 10 aa, Artificial Sequence
  Description of Artificial Sequence: Synthetic epitope
PSIAITTVSQ

SEQ ID NO: 33942 - protein, 10 aa, Artificial Sequence
  Description of Artificial Sequence: Synthetic epitope
PSIASSIPSE

SEQ ID NO: 33943 - protein, 10 aa, Artificial Sequence
  Description of Artificial Sequence: Synthetic epitope
PSIDLTVAPA

SEQ ID NO: 33944 - protein, 10 aa, Artificial Sequence
  Description of Artificial Sequence: Synthetic epitope
PSIEISASSK

SEQ ID NO: 33945 - protein, 10 aa, Artificial Sequence
  Description of Artificial Sequence: Synthetic epitope
PSIKESVYVK

SEQ ID NO: 33946 - protein, 10 aa, Artificial Sequence
  Description of Artificial Sequence: Synthetic epitope
PSIKLQSSDG

SEQ ID NO: 33947 - protein, 10 aa, Artificial Sequence
  Description of Artificial Sequence: Synthetic epitope
PSIQIVQTLP

SEQ ID NO: 33948 - protein, 10 aa, Artificial Sequence
  Description of Artificial Sequence: Synthetic epitope
PSIRARVDAK

SEQ ID NO: 33949 - protein, 10 aa, Artificial Sequence
  Description of Artificial Sequence: Synthetic epitope
PSISVSVSET

SEQ ID NO: 33950 - protein, 10 aa, Artificial Sequence
  Description of Artificial Sequence: Synthetic epitope
PSITSASLEA

SEQ ID NO: 33951 - protein, 10 aa, Artificial Sequence
  Description of Artificial Sequence: Synthetic epitope
PSKAKAEKPP

SEQ ID NO: 33952 - protein, 10 aa, Artificial Sequence
  Description of Artificial Sequence: Synthetic epitope
PSKAREYSKE

SEQ ID NO: 33953 - protein, 10 aa, Artificial Sequence
  Description of Artificial Sequence: Synthetic epitope
PSKASSVEDT

SEQ ID NO: 33954 - protein, 10 aa, Artificial Sequence
  Description of Artificial Sequence: Synthetic epitope
PSKAVSKDPM

SEQ ID NO: 33955 - protein, 10 aa, Artificial Sequence
  Description of Artificial Sequence: Synthetic epitope
PSKDKDSKSS

SEQ ID NO: 33956 - protein, 10 aa, Artificial Sequence
  Description of Artificial Sequence: Synthetic epitope
PSKDTDDQSR

SEQ ID NO: 33957 - protein, 10 aa, Artificial Sequence
  Description of Artificial Sequence: Synthetic epitope
PSKHENSKDV

SEQ ID NO: 33958 - protein, 10 aa, Artificial Sequence
  Description of Artificial Sequence: Synthetic epitope
PSKIKASSGP

SEQ ID NO: 33959 - protein, 10 aa, Artificial Sequence
  Description of Artificial Sequence: Synthetic epitope
PSKKSAKRTI

SEQ ID NO: 33960 - protein, 10 aa, Artificial Sequence
  Description of Artificial Sequence: Synthetic epitope
PSKLESESDN

SEQ ID NO: 33961 - protein, 10 aa, Artificial Sequence
  Description of Artificial Sequence: Synthetic epitope
PSKLKSKSSG

SEQ ID NO: 33962 - protein, 10 aa, Artificial Sequence
  Description of Artificial Sequence: Synthetic epitope
PSKNSSRRNQ

SEQ ID NO: 33963 - protein, 10 aa, Artificial Sequence
  Description of Artificial Sequence: Synthetic epitope
PSKNYNMMTV

SEQ ID NO: 33964 - protein, 10 aa, Artificial Sequence
  Description of Artificial Sequence: Synthetic epitope
PSKQMKVTVS

SEQ ID NO: 33965 - protein, 10 aa, Artificial Sequence
  Description of Artificial Sequence: Synthetic epitope
PSKQYGLKMK

SEQ ID NO: 33966 - protein, 10 aa, Artificial Sequence
  Description of Artificial Sequence: Synthetic epitope
PSKRKQNQYI

SEQ ID NO: 33967 - protein, 10 aa, Artificial Sequence
  Description of Artificial Sequence: Synthetic epitope
PSKSLDLNKN

SEQ ID NO: 33968 - protein, 10 aa, Artificial Sequence
  Description of Artificial Sequence: Synthetic epitope
PSKTMSIKER

SEQ ID NO: 33969 - protein, 10 aa, Artificial Sequence
  Description of Artificial Sequence: Synthetic epitope
PSKVASLSDS

SEQ ID NO: 33970 - protein, 10 aa, Artificial Sequence
  Description of Artificial Sequence: Synthetic epitope
PSKVVIKLSP

SEQ ID NO: 33971 - protein, 10 aa, Artificial Sequence
  Description of Artificial Sequence: Synthetic epitope
PSLAASLLRL

SEQ ID NO: 33972 - protein, 10 aa, Artificial Sequence
  Description of Artificial Sequence: Synthetic epitope
PSLAEGNKAK

SEQ ID NO: 33973 - protein, 10 aa, Artificial Sequence
  Description of Artificial Sequence: Synthetic epitope
PSLALQSHLE

SEQ ID NO: 33974 - protein, 10 aa, Artificial Sequence
  Description of Artificial Sequence: Synthetic epitope
PSLAQLAMDA

SEQ ID NO: 33975 - protein, 10 aa, Artificial Sequence
  Description of Artificial Sequence: Synthetic epitope
PSLDTISSVG

SEQ ID NO: 33976 - protein, 10 aa, Artificial Sequence
  Description of Artificial Sequence: Synthetic epitope
PSLEASEAAD

SEQ ID NO: 33977 - protein, 10 aa, Artificial Sequence
  Description of Artificial Sequence: Synthetic epitope
PSLELLVEES

SEQ ID NO: 33978 - protein, 10 aa, Artificial Sequence
  Description of Artificial Sequence: Synthetic epitope
PSLGSAVQSG

SEQ ID NO: 33979 - protein, 10 aa, Artificial Sequence
  Description of Artificial Sequence: Synthetic epitope
PSLIPKLMSF

SEQ ID NO: 33980 - protein, 10 aa, Artificial Sequence
  Description of Artificial Sequence: Synthetic epitope
PSLKRSLMPY

SEQ ID NO: 33981 - protein, 10 aa, Artificial Sequence
  Description of Artificial Sequence: Synthetic epitope
PSLKSKTNDG

SEQ ID NO: 33982 - protein, 10 aa, Artificial Sequence
  Description of Artificial Sequence: Synthetic epitope
PSLKSLVATG

SEQ ID NO: 33983 - protein, 10 aa, Artificial Sequence
  Description of Artificial Sequence: Synthetic epitope
PSLKSTKASK

SEQ ID NO: 33984 - protein, 10 aa, Artificial Sequence
  Description of Artificial Sequence: Synthetic epitope
PSLLASPEED

SEQ ID NO: 33985 - protein, 10 aa, Artificial Sequence
  Description of Artificial Sequence: Synthetic epitope
PSLLEQAGSE

SEQ ID NO: 33986 - protein, 10 aa, Artificial Sequence
  Description of Artificial Sequence: Synthetic epitope
PSLLGASPTI

SEQ ID NO: 33987 - protein, 10 aa, Artificial Sequence
  Description of Artificial Sequence: Synthetic epitope
PSLLSAPPKM

SEQ ID NO: 33988 - protein, 10 aa, Artificial Sequence
  Description of Artificial Sequence: Synthetic epitope
PSLLTMMKEN

SEQ ID NO: 33989 - protein, 10 aa, Artificial Sequence
  Description of Artificial Sequence: Synthetic epitope
PSLLTTMKNT

SEQ ID NO: 33990 - protein, 10 aa, Artificial Sequence
  Description of Artificial Sequence: Synthetic epitope
PSLMSSKVEE

SEQ ID NO: 33991 - protein, 10 aa, Artificial Sequence
  Description of Artificial Sequence: Synthetic epitope
PSLQIVKSEE

SEQ ID NO: 33992 - protein, 10 aa, Artificial Sequence
  Description of Artificial Sequence: Synthetic epitope
PSLQLLSRKQ

SEQ ID NO: 33993 - protein, 10 aa, Artificial Sequence
  Description of Artificial Sequence: Synthetic epitope
PSLQMADEES

SEQ ID NO: 33994 - protein, 10 aa, Artificial Sequence
  Description of Artificial Sequence: Synthetic epitope
PSLQSSVRQR

SEQ ID NO: 33995 - protein, 10 aa, Artificial Sequence
  Description of Artificial Sequence: Synthetic epitope
PSLRKDSTPV

SEQ ID NO: 33996 - protein, 10 aa, Artificial Sequence
  Description of Artificial Sequence: Synthetic epitope
PSLRLSLASS

SEQ ID NO: 33997 - protein, 10 aa, Artificial Sequence
  Description of Artificial Sequence: Synthetic epitope
PSLSALRSSK

SEQ ID NO: 33998 - protein, 10 aa, Artificial Sequence
  Description of Artificial Sequence: Synthetic epitope
PSLSARDASS

SEQ ID NO: 33999 - protein, 10 aa, Artificial Sequence
  Description of Artificial Sequence: Synthetic epitope
PSLSDILLEE

SEQ ID NO: 34000 - protein, 10 aa, Artificial Sequence
  Description of Artificial Sequence: Synthetic epitope
PSLSEADKYQ

SEQ ID NO: 34001 - protein, 10 aa, Artificial Sequence
  Description of Artificial Sequence: Synthetic epitope
PSLSKTEVDQ

SEQ ID NO: 34002 - protein, 10 aa, Artificial Sequence
  Description of Artificial Sequence: Synthetic epitope
PSLSQTDLEE

SEQ ID NO: 34003 - protein, 10 aa, Artificial Sequence
  Description of Artificial Sequence: Synthetic epitope
PSLSSKIIQD

SEQ ID NO: 34004 - protein, 10 aa, Artificial Sequence
  Description of Artificial Sequence: Synthetic epitope
PSLTAMETSP

SEQ ID NO: 34005 - protein, 10 aa, Artificial Sequence
  Description of Artificial Sequence: Synthetic epitope
PSLTSANKKN

SEQ ID NO: 34006 - protein, 10 aa, Artificial Sequence
  Description of Artificial Sequence: Synthetic epitope
PSLTVNTTEY

SEQ ID NO: 34007 - protein, 10 aa, Artificial Sequence
  Description of Artificial Sequence: Synthetic epitope
PSLVKSTSQL

SEQ ID NO: 34008 - protein, 10 aa, Artificial Sequence
  Description of Artificial Sequence: Synthetic epitope
PSMAKIKSHS

SEQ ID NO: 34009 - protein, 10 aa, Artificial Sequence
  Description of Artificial Sequence: Synthetic epitope
PSMLSQAQSA

SEQ ID NO: 34010 - protein, 10 aa, Artificial Sequence
  Description of Artificial Sequence: Synthetic epitope
PSMMERNHGH

SEQ ID NO: 34011 - protein, 10 aa, Artificial Sequence
  Description of Artificial Sequence: Synthetic epitope
PSMQKSVQNK

SEQ ID NO: 34012 - protein, 10 aa, Artificial Sequence
  Description of Artificial Sequence: Synthetic epitope
PSMQPKKMQM

SEQ ID NO: 34013 - protein, 10 aa, Artificial Sequence
  Description of Artificial Sequence: Synthetic epitope
PSMQSAQGLI

SEQ ID NO: 34014 - protein, 10 aa, Artificial Sequence
  Description of Artificial Sequence: Synthetic epitope
PSMSAALPFP

SEQ ID NO: 34015 - protein, 10 aa, Artificial Sequence
  Description of Artificial Sequence: Synthetic epitope
PSMSLASPQP

SEQ ID NO: 34016 - protein, 10 aa, Artificial Sequence
  Description of Artificial Sequence: Synthetic epitope
PSMTAEQVAA

SEQ ID NO: 34017 - protein, 10 aa, Artificial Sequence
  Description of Artificial Sequence: Synthetic epitope
PSMTTVDQLE

SEQ ID NO: 34018 - protein, 10 aa, Artificial Sequence
  Description of Artificial Sequence: Synthetic epitope
PSMVAMFENF

SEQ ID NO: 34019 - protein, 10 aa, Artificial Sequence
  Description of Artificial Sequence: Synthetic epitope
PSNATRSLRT

SEQ ID NO: 34020 - protein, 10 aa, Artificial Sequence
  Description of Artificial Sequence: Synthetic epitope
PSNKTAEKET

SEQ ID NO: 34021 - protein, 10 aa, Artificial Sequence
  Description of Artificial Sequence: Synthetic epitope
PSNQTTLPAT

SEQ ID NO: 34022 - protein, 10 aa, Artificial Sequence
  Description of Artificial Sequence: Synthetic epitope
PSNQYQSTRK

SEQ ID NO: 34023 - protein, 10 aa, Artificial Sequence
  Description of Artificial Sequence: Synthetic epitope
PSNRTSAGTS

SEQ ID NO: 34024 - protein, 10 aa, Artificial Sequence
  Description of Artificial Sequence: Synthetic epitope
PSNTKFVALA

SEQ ID NO: 34025 - protein, 10 aa, Artificial Sequence
  Description of Artificial Sequence: Synthetic epitope
PSNVVKESAR

SEQ ID NO: 34026 - protein, 10 aa, Artificial Sequence
  Description of Artificial Sequence: Synthetic epitope
PSPESAQSPS

SEQ ID NO: 34027 - protein, 10 aa, Artificial Sequence
  Description of Artificial Sequence: Synthetic epitope
PSPESTLTVT

SEQ ID NO: 34028 - protein, 10 aa, Artificial Sequence
  Description of Artificial Sequence: Synthetic epitope
PSPGVSQNKQ

SEQ ID NO: 34029 - protein, 10 aa, Artificial Sequence
  Description of Artificial Sequence: Synthetic epitope
PSPKKMSFRK

SEQ ID NO: 34030 - protein, 10 aa, Artificial Sequence
  Description of Artificial Sequence: Synthetic epitope
PSPKVEKKDP

SEQ ID NO: 34031 - protein, 10 aa, Artificial Sequence
  Description of Artificial Sequence: Synthetic epitope
PSPLKNKLSH

SEQ ID NO: 34032 - protein, 10 aa, Artificial Sequence
  Description of Artificial Sequence: Synthetic epitope
PSPLVVSVDK

SEQ ID NO: 34033 - protein, 10 aa, Artificial Sequence
  Description of Artificial Sequence: Synthetic epitope
PSPPSSAHSK

SEQ ID NO: 34034 - protein, 10 aa, Artificial Sequence
  Description of Artificial Sequence: Synthetic epitope
PSPQRAFTLQ

SEQ ID NO: 34035 - protein, 10 aa, Artificial Sequence
  Description of Artificial Sequence: Synthetic epitope
PSPSSVVKME

SEQ ID NO: 34036 - protein, 10 aa, Artificial Sequence
  Description of Artificial Sequence: Synthetic epitope
PSPVATSYPS

SEQ ID NO: 34037 - protein, 10 aa, Artificial Sequence
  Description of Artificial Sequence: Synthetic epitope
PSQALPQQLQ

SEQ ID NO: 34038 - protein, 10 aa, Artificial Sequence
  Description of Artificial Sequence: Synthetic epitope
PSQASRALTE

SEQ ID NO: 34039 - protein, 10 aa, Artificial Sequence
  Description of Artificial Sequence: Synthetic epitope
PSQAYEKAQE

SEQ ID NO: 34040 - protein, 10 aa, Artificial Sequence
  Description of Artificial Sequence: Synthetic epitope
PSQEMDKMLK

SEQ ID NO: 34041 - protein, 10 aa, Artificial Sequence
  Description of Artificial Sequence: Synthetic epitope
PSQFSKEERV

SEQ ID NO: 34042 - protein, 10 aa, Artificial Sequence
  Description of Artificial Sequence: Synthetic epitope
PSQKTLDLQS

SEQ ID NO: 34043 - protein, 10 aa, Artificial Sequence
  Description of Artificial Sequence: Synthetic epitope
PSQNLVSKET

SEQ ID NO: 34044 - protein, 10 aa, Artificial Sequence
  Description of Artificial Sequence: Synthetic epitope
PSQNMTDNQT

SEQ ID NO: 34045 - protein, 10 aa, Artificial Sequence
  Description of Artificial Sequence: Synthetic epitope
PSQNNAANIS

SEQ ID NO: 34046 - protein, 10 aa, Artificial Sequence
  Description of Artificial Sequence: Synthetic epitope
PSQQTQAAYP

SEQ ID NO: 34047 - protein, 10 aa, Artificial Sequence
  Description of Artificial Sequence: Synthetic epitope
PSQQTTMYQQ

SEQ ID NO: 34048 - protein, 10 aa, Artificial Sequence
  Description of Artificial Sequence: Synthetic epitope
PSQRQAIGIE

SEQ ID NO: 34049 - protein, 10 aa, Artificial Sequence
  Description of Artificial Sequence: Synthetic epitope
PSQRRTRSRS

SEQ ID NO: 34050 - protein, 10 aa, Artificial Sequence
  Description of Artificial Sequence: Synthetic epitope
PSQSATSPSP

SEQ ID NO: 34051 - protein, 10 aa, Artificial Sequence
  Description of Artificial Sequence: Synthetic epitope
PSQSDQLLAE

SEQ ID NO: 34052 - protein, 10 aa, Artificial Sequence
  Description of Artificial Sequence: Synthetic epitope
PSQSRSSVQR

SEQ ID NO: 34053 - protein, 10 aa, Artificial Sequence
  Description of Artificial Sequence: Synthetic epitope
PSQSVEVSQS

SEQ ID NO: 34054 - protein, 10 aa, Artificial Sequence
  Description of Artificial Sequence: Synthetic epitope
PSQTAEEVVT

SEQ ID NO: 34055 - protein, 10 aa, Artificial Sequence
  Description of Artificial Sequence: Synthetic epitope
PSQTESVTSN

SEQ ID NO: 34056 - protein, 10 aa, Artificial Sequence
  Description of Artificial Sequence: Synthetic epitope
PSQTISSDLM

SEQ ID NO: 34057 - protein, 10 aa, Artificial Sequence
  Description of Artificial Sequence: Synthetic epitope
PSQYSSPTTI

SEQ ID NO: 34058 - protein, 10 aa, Artificial Sequence
  Description of Artificial Sequence: Synthetic epitope
PSRAVAGSRS

SEQ ID NO: 34059 - protein, 10 aa, Artificial Sequence
  Description of Artificial Sequence: Synthetic epitope
PSRDAAESSE

SEQ ID NO: 34060 - protein, 10 aa, Artificial Sequence
  Description of Artificial Sequence: Synthetic epitope
PSRGNLAQPG

SEQ ID NO: 34061 - protein, 10 aa, Artificial Sequence
  Description of Artificial Sequence: Synthetic epitope
PSRGSAKSRG

SEQ ID NO: 34062 - protein, 10 aa, Artificial Sequence
  Description of Artificial Sequence: Synthetic epitope
PSRGSVQSEG

SEQ ID NO: 34063 - protein, 10 aa, Artificial Sequence
  Description of Artificial Sequence: Synthetic epitope
PSRKVQFNQN

SEQ ID NO: 34064 - protein, 10 aa, Artificial Sequence
  Description of Artificial Sequence: Synthetic epitope
PSRLASKTKT

SEQ ID NO: 34065 - protein, 10 aa, Artificial Sequence
  Description of Artificial Sequence: Synthetic epitope
PSRLKALGTL

SEQ ID NO: 34066 - protein, 10 aa, Artificial Sequence
  Description of Artificial Sequence: Synthetic epitope
PSRLKLNKRK

SEQ ID NO: 34067 - protein, 10 aa, Artificial Sequence
  Description of Artificial Sequence: Synthetic epitope
PSRLMTGEDG

SEQ ID NO: 34068 - protein, 10 aa, Artificial Sequence
  Description of Artificial Sequence: Synthetic epitope
PSRPQSVSRP

SEQ ID NO: 34069 - protein, 10 aa, Artificial Sequence
  Description of Artificial Sequence: Synthetic epitope
PSRQASQHHG

SEQ ID NO: 34070 - protein, 10 aa, Artificial Sequence
  Description of Artificial Sequence: Synthetic epitope
PSRQSSIVKN

SEQ ID NO: 34071 - protein, 10 aa, Artificial Sequence
  Description of Artificial Sequence: Synthetic epitope
PSRRFKRVVE

SEQ ID NO: 34072 - protein, 10 aa, Artificial Sequence
  Description of Artificial Sequence: Synthetic epitope
PSRRFKRVVE

SEQ ID NO: 34073 - protein, 10 aa, Artificial Sequence
  Description of Artificial Sequence: Synthetic epitope
PSRRKKQQKR

SEQ ID NO: 34074 - protein, 10 aa, Artificial Sequence
  Description of Artificial Sequence: Synthetic epitope
PSRSERNSTE

SEQ ID NO: 34075 - protein, 10 aa, Artificial Sequence
  Description of Artificial Sequence: Synthetic epitope
PSRSLRSRQV

SEQ ID NO: 34076 - protein, 10 aa, Artificial Sequence
  Description of Artificial Sequence: Synthetic epitope
PSRSVSVDES

SEQ ID NO: 34077 - protein, 10 aa, Artificial Sequence
  Description of Artificial Sequence: Synthetic epitope
PSRTAELKKA

SEQ ID NO: 34078 - protein, 10 aa, Artificial Sequence
  Description of Artificial Sequence: Synthetic epitope
PSSAASSTTP

SEQ ID NO: 34079 - protein, 10 aa, Artificial Sequence
  Description of Artificial Sequence: Synthetic epitope
PSSAQAQASS

SEQ ID NO: 34080 - protein, 10 aa, Artificial Sequence
  Description of Artificial Sequence: Synthetic epitope
PSSASELASL

SEQ ID NO: 34081 - protein, 10 aa, Artificial Sequence
  Description of Artificial Sequence: Synthetic epitope
PSSASKANTT

SEQ ID NO: 34082 - protein, 10 aa, Artificial Sequence
  Description of Artificial Sequence: Synthetic epitope
PSSATGKRQT

SEQ ID NO: 34083 - protein, 10 aa, Artificial Sequence
  Description of Artificial Sequence: Synthetic epitope
PSSATPHSQK

SEQ ID NO: 34084 - protein, 10 aa, Artificial Sequence
  Description of Artificial Sequence: Synthetic epitope
PSSATVKDTR

SEQ ID NO: 34085 - protein, 10 aa, Artificial Sequence
  Description of Artificial Sequence: Synthetic epitope
PSSAVLRSLR

SEQ ID NO: 34086 - protein, 10 aa, Artificial Sequence
  Description of Artificial Sequence: Synthetic epitope
PSSDKTIIAP

SEQ ID NO: 34087 - protein, 10 aa, Artificial Sequence
  Description of Artificial Sequence: Synthetic epitope
PSSDTFGNSS

SEQ ID NO: 34088 - protein, 10 aa, Artificial Sequence
  Description of Artificial Sequence: Synthetic epitope
PSSEHRAREH

SEQ ID NO: 34089 - protein, 10 aa, Artificial Sequence
  Description of Artificial Sequence: Synthetic epitope
PSSENVNKKS

SEQ ID NO: 34090 - protein, 10 aa, Artificial Sequence
  Description of Artificial Sequence: Synthetic epitope
PSSESLTSED

SEQ ID NO: 34091 - protein, 10 aa, Artificial Sequence
  Description of Artificial Sequence: Synthetic epitope
PSSGMSAKEL

SEQ ID NO: 34092 - protein, 10 aa, Artificial Sequence
  Description of Artificial Sequence: Synthetic epitope
PSSGMSSTMK

SEQ ID NO: 34093 - protein, 10 aa, Artificial Sequence
  Description of Artificial Sequence: Synthetic epitope
PSSGVMSTEQ

SEQ ID NO: 34094 - protein, 10 aa, Artificial Sequence
  Description of Artificial Sequence: Synthetic epitope
PSSISSQTRQ

SEQ ID NO: 34095 - protein, 10 aa, Artificial Sequence
  Description of Artificial Sequence: Synthetic epitope
PSSIVAKVQS

SEQ ID NO: 34096 - protein, 10 aa, Artificial Sequence
  Description of Artificial Sequence: Synthetic epitope
PSSIVREDQT

SEQ ID NO: 34097 - protein, 10 aa, Artificial Sequence
  Description of Artificial Sequence: Synthetic epitope
PSSKETNKMK

SEQ ID NO: 34098 - protein, 10 aa, Artificial Sequence
  Description of Artificial Sequence: Synthetic epitope
PSSKLTVDTD

SEQ ID NO: 34099 - protein, 10 aa, Artificial Sequence
  Description of Artificial Sequence: Synthetic epitope
PSSKQAKVTY

SEQ ID NO: 34100 - protein, 10 aa, Artificial Sequence
  Description of Artificial Sequence: Synthetic epitope
PSSLKIKKSK

SEQ ID NO: 34101 - protein, 10 aa, Artificial Sequence
  Description of Artificial Sequence: Synthetic epitope
PSSLLGAAMP

SEQ ID NO: 34102 - protein, 10 aa, Artificial Sequence
  Description of Artificial Sequence: Synthetic epitope
PSSLSALLSR

SEQ ID NO: 34103 - protein, 10 aa, Artificial Sequence
  Description of Artificial Sequence: Synthetic epitope
PSSLSNNYNN

SEQ ID NO: 34104 - protein, 10 aa, Artificial Sequence
  Description of Artificial Sequence: Synthetic epitope
PSSLSSQLAG

SEQ ID NO: 34105 - protein, 10 aa, Artificial Sequence
  Description of Artificial Sequence: Synthetic epitope
PSSLSTAGIF

SEQ ID NO: 34106 - protein, 10 aa, Artificial Sequence
  Description of Artificial Sequence: Synthetic epitope
PSSLTSTERA

SEQ ID NO: 34107 - protein, 10 aa, Artificial Sequence
  Description of Artificial Sequence: Synthetic epitope
PSSMSSEVAE

SEQ ID NO: 34108 - protein, 10 aa, Artificial Sequence
  Description of Artificial Sequence: Synthetic epitope
PSSMVSETST

SEQ ID NO: 34109 - protein, 10 aa, Artificial Sequence
  Description of Artificial Sequence: Synthetic epitope
PSSNKPRVIR

SEQ ID NO: 34110 - protein, 10 aa, Artificial Sequence
  Description of Artificial Sequence: Synthetic epitope
PSSPIMVDND

SEQ ID NO: 34111 - protein, 10 aa, Artificial Sequence
  Description of Artificial Sequence: Synthetic epitope
PSSPNAEASA

SEQ ID NO: 34112 - protein, 10 aa, Artificial Sequence
  Description of Artificial Sequence: Synthetic epitope
PSSQALTETP

SEQ ID NO: 34113 - protein, 10 aa, Artificial Sequence
  Description of Artificial Sequence: Synthetic epitope
PSSQISMVPN

SEQ ID NO: 34114 - protein, 10 aa, Artificial Sequence
  Description of Artificial Sequence: Synthetic epitope
PSSQKRAIEL

SEQ ID NO: 34115 - protein, 10 aa, Artificial Sequence
  Description of Artificial Sequence: Synthetic epitope
PSSRSAVSIG

SEQ ID NO: 34116 - protein, 10 aa, Artificial Sequence
  Description of Artificial Sequence: Synthetic epitope
PSSRSQVTPQ

SEQ ID NO: 34117 - protein, 10 aa, Artificial Sequence
  Description of Artificial Sequence: Synthetic epitope
PSSTAVQESP

SEQ ID NO: 34118 - protein, 10 aa, Artificial Sequence
  Description of Artificial Sequence: Synthetic epitope
PSSTKSTPAS

SEQ ID NO: 34119 - protein, 10 aa, Artificial Sequence
  Description of Artificial Sequence: Synthetic epitope
PSSTSATISL

SEQ ID NO: 34120 - protein, 10 aa, Artificial Sequence
  Description of Artificial Sequence: Synthetic epitope
PSSTSTIADT

SEQ ID NO: 34121 - protein, 10 aa, Artificial Sequence
  Description of Artificial Sequence: Synthetic epitope
PSSTTMEKEK

SEQ ID NO: 34122 - protein, 10 aa, Artificial Sequence
  Description of Artificial Sequence: Synthetic epitope
PSSTVIKKPS

SEQ ID NO: 34123 - protein, 10 aa, Artificial Sequence
  Description of Artificial Sequence: Synthetic epitope
PSSVNYSESN

SEQ ID NO: 34124 - protein, 10 aa, Artificial Sequence
  Description of Artificial Sequence: Synthetic epitope
PSSVQSVAVP

SEQ ID NO: 34125 - protein, 10 aa, Artificial Sequence
  Description of Artificial Sequence: Synthetic epitope
PSSVSTVSTI

SEQ ID NO: 34126 - protein, 10 aa, Artificial Sequence
  Description of Artificial Sequence: Synthetic epitope
PSSVVRAFKA

SEQ ID NO: 34127 - protein, 10 aa, Artificial Sequence
  Description of Artificial Sequence: Synthetic epitope
PSSYVNTKEM

SEQ ID NO: 34128 - protein, 10 aa, Artificial Sequence
  Description of Artificial Sequence: Synthetic epitope
PSTAAITAAS

SEQ ID NO: 34129 - protein, 10 aa, Artificial Sequence
  Description of Artificial Sequence: Synthetic epitope
PSTASVGKSK

SEQ ID NO: 34130 - protein, 10 aa, Artificial Sequence
  Description of Artificial Sequence: Synthetic epitope
PSTDASASDV

SEQ ID NO: 34131 - protein, 10 aa, Artificial Sequence
  Description of Artificial Sequence: Synthetic epitope
PSTDKQMDKK

SEQ ID NO: 34132 - protein, 10 aa, Artificial Sequence
  Description of Artificial Sequence: Synthetic epitope
PSTEASSYEM

SEQ ID NO: 34133 - protein, 10 aa, Artificial Sequence
  Description of Artificial Sequence: Synthetic epitope
PSTELSITSR

SEQ ID NO: 34134 - protein, 10 aa, Artificial Sequence
  Description of Artificial Sequence: Synthetic epitope
PSTEVTTSHT

SEQ ID NO: 34135 - protein, 10 aa, Artificial Sequence
  Description of Artificial Sequence: Synthetic epitope
PSTGAQSTAH

SEQ ID NO: 34136 - protein, 10 aa, Artificial Sequence
  Description of Artificial Sequence: Synthetic epitope
PSTGSTAETQ

SEQ ID NO: 34137 - protein, 10 aa, Artificial Sequence
  Description of Artificial Sequence: Synthetic epitope
PSTISGALNQ

SEQ ID NO: 34138 - protein, 10 aa, Artificial Sequence
  Description of Artificial Sequence: Synthetic epitope
PSTKESSQPD

SEQ ID NO: 34139 - protein, 10 aa, Artificial Sequence
  Description of Artificial Sequence: Synthetic epitope
PSTLNSRQSS

SEQ ID NO: 34140 - protein, 10 aa, Artificial Sequence
  Description of Artificial Sequence: Synthetic epitope
PSTLVEAREV

SEQ ID NO: 34141 - protein, 10 aa, Artificial Sequence
  Description of Artificial Sequence: Synthetic epitope
PSTMSAVQLE

SEQ ID NO: 34142 - protein, 10 aa, Artificial Sequence
  Description of Artificial Sequence: Synthetic epitope
PSTNKNTKSQ

SEQ ID NO: 34143 - protein, 10 aa, Artificial Sequence
  Description of Artificial Sequence: Synthetic epitope
PSTPTASRRN

SEQ ID NO: 34144 - protein, 10 aa, Artificial Sequence
  Description of Artificial Sequence: Synthetic epitope
PSTQSAQIES

SEQ ID NO: 34145 - protein, 10 aa, Artificial Sequence
  Description of Artificial Sequence: Synthetic epitope
PSTRKAKTIP

SEQ ID NO: 34146 - protein, 10 aa, Artificial Sequence
  Description of Artificial Sequence: Synthetic epitope
PSTSISIFKK

SEQ ID NO: 34147 - protein, 10 aa, Artificial Sequence
  Description of Artificial Sequence: Synthetic epitope
PSTSLSSAKK

SEQ ID NO: 34148 - protein, 10 aa, Artificial Sequence
  Description of Artificial Sequence: Synthetic epitope
PSTSNSKMAS

SEQ ID NO: 34149 - protein, 10 aa, Artificial Sequence
  Description of Artificial Sequence: Synthetic epitope
PSTSQPQSSM

SEQ ID NO: 34150 - protein, 10 aa, Artificial Sequence
  Description of Artificial Sequence: Synthetic epitope
PSTSQTVSTP

SEQ ID NO: 34151 - protein, 10 aa, Artificial Sequence
  Description of Artificial Sequence: Synthetic epitope
PSTSSKKTKR

SEQ ID NO: 34152 - protein, 10 aa, Artificial Sequence
  Description of Artificial Sequence: Synthetic epitope
PSTSSNLESD

SEQ ID NO: 34153 - protein, 10 aa, Artificial Sequence
  Description of Artificial Sequence: Synthetic epitope
PSTSTAQEQD

SEQ ID NO: 34154 - protein, 10 aa, Artificial Sequence
  Description of Artificial Sequence: Synthetic epitope
PSTSVSLTTA

SEQ ID NO: 34155 - protein, 10 aa, Artificial Sequence
  Description of Artificial Sequence: Synthetic epitope
PSTTKTTAKR

SEQ ID NO: 34156 - protein, 10 aa, Artificial Sequence
  Description of Artificial Sequence: Synthetic epitope
PSTTSAILDS

SEQ ID NO: 34157 - protein, 10 aa, Artificial Sequence
  Description of Artificial Sequence: Synthetic epitope
PSTVLYTATQ

SEQ ID NO: 34158 - protein, 10 aa, Artificial Sequence
  Description of Artificial Sequence: Synthetic epitope
PSTVSVWTIE

SEQ ID NO: 34159 - protein, 10 aa, Artificial Sequence
  Description of Artificial Sequence: Synthetic epitope
PSVAGSVASS

SEQ ID NO: 34160 - protein, 10 aa, Artificial Sequence
  Description of Artificial Sequence: Synthetic epitope
PSVAKGKSRA

SEQ ID NO: 34161 - protein, 10 aa, Artificial Sequence
  Description of Artificial Sequence: Synthetic epitope
PSVANELRHK

SEQ ID NO: 34162 - protein, 10 aa, Artificial Sequence
  Description of Artificial Sequence: Synthetic epitope
PSVDQKQIEE

SEQ ID NO: 34163 - protein, 10 aa, Artificial Sequence
  Description of Artificial Sequence: Synthetic epitope
PSVDSAMFGI

SEQ ID NO: 34164 - protein, 10 aa, Artificial Sequence
  Description of Artificial Sequence: Synthetic epitope
PSVEGARTTS

SEQ ID NO: 34165 - protein, 10 aa, Artificial Sequence
  Description of Artificial Sequence: Synthetic epitope
PSVEKEEVEG

SEQ ID NO: 34166 - protein, 10 aa, Artificial Sequence
  Description of Artificial Sequence: Synthetic epitope
PSVELSSAKP

SEQ ID NO: 34167 - protein, 10 aa, Artificial Sequence
  Description of Artificial Sequence: Synthetic epitope
PSVGMYSPGY

SEQ ID NO: 34168 - protein, 10 aa, Artificial Sequence
  Description of Artificial Sequence: Synthetic epitope
PSVGSSVGSV

SEQ ID NO: 34169 - protein, 10 aa, Artificial Sequence
  Description of Artificial Sequence: Synthetic epitope
PSVGSSVGSV

SEQ ID NO: 34170 - protein, 10 aa, Artificial Sequence
  Description of Artificial Sequence: Synthetic epitope
PSVKKAPKKR

SEQ ID NO: 34171 - protein, 10 aa, Artificial Sequence
  Description of Artificial Sequence: Synthetic epitope
PSVKKRSSTL

SEQ ID NO: 34172 - protein, 10 aa, Artificial Sequence
  Description of Artificial Sequence: Synthetic epitope
PSVKPVVSSA

SEQ ID NO: 34173 - protein, 10 aa, Artificial Sequence
  Description of Artificial Sequence: Synthetic epitope
PSVKTSQSEA

SEQ ID NO: 34174 - protein, 10 aa, Artificial Sequence
  Description of Artificial Sequence: Synthetic epitope
PSVLESKVRA

SEQ ID NO: 34175 - protein, 10 aa, Artificial Sequence
  Description of Artificial Sequence: Synthetic epitope
PSVLKLQTAS

SEQ ID NO: 34176 - protein, 10 aa, Artificial Sequence
  Description of Artificial Sequence: Synthetic epitope
PSVLSSEQEF

SEQ ID NO: 34177 - protein, 10 aa, Artificial Sequence
  Description of Artificial Sequence: Synthetic epitope
PSVSLQEASS

SEQ ID NO: 34178 - protein, 10 aa, Artificial Sequence
  Description of Artificial Sequence: Synthetic epitope
PSVSTSFGLS

SEQ ID NO: 34179 - protein, 10 aa, Artificial Sequence
  Description of Artificial Sequence: Synthetic epitope
PSVSVSTAAI

SEQ ID NO: 34180 - protein, 10 aa, Artificial Sequence
  Description of Artificial Sequence: Synthetic epitope
PSVTKESSLR

SEQ ID NO: 34181 - protein, 10 aa, Artificial Sequence
  Description of Artificial Sequence: Synthetic epitope
PSVVKAAITF

SEQ ID NO: 34182 - protein, 10 aa, Artificial Sequence
  Description of Artificial Sequence: Synthetic epitope
PSWASARDRQ

SEQ ID NO: 34183 - protein, 10 aa, Artificial Sequence
  Description of Artificial Sequence: Synthetic epitope
PSWNGLGSIP

SEQ ID NO: 34184 - protein, 10 aa, Artificial Sequence
  Description of Artificial Sequence: Synthetic epitope
PSYFIVYQTQ

SEQ ID NO: 34185 - protein, 10 aa, Artificial Sequence
  Description of Artificial Sequence: Synthetic epitope
PSYIQEAKAK

SEQ ID NO: 34186 - protein, 10 aa, Artificial Sequence
  Description of Artificial Sequence: Synthetic epitope
PSYNYEIVNR

SEQ ID NO: 34187 - protein, 10 aa, Artificial Sequence
  Description of Artificial Sequence: Synthetic epitope
PSYRMDDGKM

SEQ ID NO: 34188 - protein, 10 aa, Artificial Sequence
  Description of Artificial Sequence: Synthetic epitope
PSYSVIQMIK

SEQ ID NO: 34189 - protein, 10 aa, Artificial Sequence
  Description of Artificial Sequence: Synthetic epitope
PSYTQSATYS

SEQ ID NO: 34190 - protein, 10 aa, Artificial Sequence
  Description of Artificial Sequence: Synthetic epitope
PSYVAVTPFS

SEQ ID NO: 34191 - protein, 10 aa, Artificial Sequence
  Description of Artificial Sequence: Synthetic epitope
PTAALSSALQ

SEQ ID NO: 34192 - protein, 10 aa, Artificial Sequence
  Description of Artificial Sequence: Synthetic epitope
PTAASSLNTV

SEQ ID NO: 34193 - protein, 10 aa, Artificial Sequence
  Description of Artificial Sequence: Synthetic epitope
PTAATLEAHK

SEQ ID NO: 34194 - protein, 10 aa, Artificial Sequence
  Description of Artificial Sequence: Synthetic epitope
PTAEADKSAA

SEQ ID NO: 34195 - protein, 10 aa, Artificial Sequence
  Description of Artificial Sequence: Synthetic epitope
PTAGAQPSLT

SEQ ID NO: 34196 - protein, 10 aa, Artificial Sequence
  Description of Artificial Sequence: Synthetic epitope
PTAGQADAEK

SEQ ID NO: 34197 - protein, 10 aa, Artificial Sequence
  Description of Artificial Sequence: Synthetic epitope
PTAGQTKSPK

SEQ ID NO: 34198 - protein, 10 aa, Artificial Sequence
  Description of Artificial Sequence: Synthetic epitope
PTAGYKRAQT

SEQ ID NO: 34199 - protein, 10 aa, Artificial Sequence
  Description of Artificial Sequence: Synthetic epitope
PTAIKTEGKP

SEQ ID NO: 34200 - protein, 10 aa, Artificial Sequence
  Description of Artificial Sequence: Synthetic epitope
PTAKLATEEP

SEQ ID NO: 34201 - protein, 10 aa, Artificial Sequence
  Description of Artificial Sequence: Synthetic epitope
PTAKPLETKS

SEQ ID NO: 34202 - protein, 10 aa, Artificial Sequence
  Description of Artificial Sequence: Synthetic epitope
PTALSRISSP

SEQ ID NO: 34203 - protein, 10 aa, Artificial Sequence
  Description of Artificial Sequence: Synthetic epitope
PTAMMPQQDG

SEQ ID NO: 34204 - protein, 10 aa, Artificial Sequence
  Description of Artificial Sequence: Synthetic epitope
PTAPESTSEP

SEQ ID NO: 34205 - protein, 10 aa, Artificial Sequence
  Description of Artificial Sequence: Synthetic epitope
PTASKNKRKK

SEQ ID NO: 34206 - protein, 10 aa, Artificial Sequence
  Description of Artificial Sequence: Synthetic epitope
PTATKLAELP

SEQ ID NO: 34207 - protein, 10 aa, Artificial Sequence
  Description of Artificial Sequence: Synthetic epitope
PTATMSTATP

SEQ ID NO: 34208 - protein, 10 aa, Artificial Sequence
  Description of Artificial Sequence: Synthetic epitope
PTATMSTATP

SEQ ID NO: 34209 - protein, 10 aa, Artificial Sequence
  Description of Artificial Sequence: Synthetic epitope
PTATSKLSGA

SEQ ID NO: 34210 - protein, 10 aa, Artificial Sequence
  Description of Artificial Sequence: Synthetic epitope
PTAVERANLL

SEQ ID NO: 34211 - protein, 10 aa, Artificial Sequence
  Description of Artificial Sequence: Synthetic epitope
PTDAKSRNSP

SEQ ID NO: 34212 - protein, 10 aa, Artificial Sequence
  Description of Artificial Sequence: Synthetic epitope
PTDELMNPSQ

SEQ ID NO: 34213 - protein, 10 aa, Artificial Sequence
  Description of Artificial Sequence: Synthetic epitope
PTDFMQTSQT

SEQ ID NO: 34214 - protein, 10 aa, Artificial Sequence
  Description of Artificial Sequence: Synthetic epitope
PTDGAVTTSQ

SEQ ID NO: 34215 - protein, 10 aa, Artificial Sequence
  Description of Artificial Sequence: Synthetic epitope
PTDKIQKDAG

SEQ ID NO: 34216 - protein, 10 aa, Artificial Sequence
  Description of Artificial Sequence: Synthetic epitope
PTDSKGSLET

SEQ ID NO: 34217 - protein, 10 aa, Artificial Sequence
  Description of Artificial Sequence: Synthetic epitope
PTEAAPMPET

SEQ ID NO: 34218 - protein, 10 aa, Artificial Sequence
  Description of Artificial Sequence: Synthetic epitope
PTEAKKAADE

SEQ ID NO: 34219 - protein, 10 aa, Artificial Sequence
  Description of Artificial Sequence: Synthetic epitope
PTEASVKNGG

SEQ ID NO: 34220 - protein, 10 aa, Artificial Sequence
  Description of Artificial Sequence: Synthetic epitope
PTEAVAMPIP

SEQ ID NO: 34221 - protein, 10 aa, Artificial Sequence
  Description of Artificial Sequence: Synthetic epitope
PTEDSALAEQ

SEQ ID NO: 34222 - protein, 10 aa, Artificial Sequence
  Description of Artificial Sequence: Synthetic epitope
PTEDSNNTES

SEQ ID NO: 34223 - protein, 10 aa, Artificial Sequence
  Description of Artificial Sequence: Synthetic epitope
PTEEQAKPYR

SEQ ID NO: 34224 - protein, 10 aa, Artificial Sequence
  Description of Artificial Sequence: Synthetic epitope
PTEESALIGH

SEQ ID NO: 34225 - protein, 10 aa, Artificial Sequence
  Description of Artificial Sequence: Synthetic epitope
PTEEVEFSSN

SEQ ID NO: 34226 - protein, 10 aa, Artificial Sequence
  Description of Artificial Sequence: Synthetic epitope
PTEKAGASGQ

SEQ ID NO: 34227 - protein, 10 aa, Artificial Sequence
  Description of Artificial Sequence: Synthetic epitope
PTEKKEANPK

SEQ ID NO: 34228 - protein, 10 aa, Artificial Sequence
  Description of Artificial Sequence: Synthetic epitope
PTEKKRSALR

SEQ ID NO: 34229 - protein, 10 aa, Artificial Sequence
  Description of Artificial Sequence: Synthetic epitope
PTEKTTGARR

SEQ ID NO: 34230 - protein, 10 aa, Artificial Sequence
  Description of Artificial Sequence: Synthetic epitope
PTEKVKAVDT

SEQ ID NO: 34231 - protein, 10 aa, Artificial Sequence
  Description of Artificial Sequence: Synthetic epitope
PTEQAATSTA

SEQ ID NO: 34232 - protein, 10 aa, Artificial Sequence
  Description of Artificial Sequence: Synthetic epitope
PTEQSLANID

SEQ ID NO: 34233 - protein, 10 aa, Artificial Sequence
  Description of Artificial Sequence: Synthetic epitope
PTESVQYEDV

SEQ ID NO: 34234 - protein, 10 aa, Artificial Sequence
  Description of Artificial Sequence: Synthetic epitope
PTETEIHNEP

SEQ ID NO: 34235 - protein, 10 aa, Artificial Sequence
  Description of Artificial Sequence: Synthetic epitope
PTFKTRKHRD

SEQ ID NO: 34236 - protein, 10 aa, Artificial Sequence
  Description of Artificial Sequence: Synthetic epitope
PTFKVIKQGL

SEQ ID NO: 34237 - protein, 10 aa, Artificial Sequence
  Description of Artificial Sequence: Synthetic epitope
PTFQLSKAEK

SEQ ID NO: 34238 - protein, 10 aa, Artificial Sequence
  Description of Artificial Sequence: Synthetic epitope
PTFTEKSVAL

SEQ ID NO: 34239 - protein, 10 aa, Artificial Sequence
  Description of Artificial Sequence: Synthetic epitope
PTGAMASADI

SEQ ID NO: 34240 - protein, 10 aa, Artificial Sequence
  Description of Artificial Sequence: Synthetic epitope
PTGGSSQVLS

SEQ ID NO: 34241 - protein, 10 aa, Artificial Sequence
  Description of Artificial Sequence: Synthetic epitope
PTGKQTDKTK

SEQ ID NO: 34242 - protein, 10 aa, Artificial Sequence
  Description of Artificial Sequence: Synthetic epitope
PTGLLSAQEL

SEQ ID NO: 34243 - protein, 10 aa, Artificial Sequence
  Description of Artificial Sequence: Synthetic epitope
PTGQHQVRMQ

SEQ ID NO: 34244 - protein, 10 aa, Artificial Sequence
  Description of Artificial Sequence: Synthetic epitope
PTGQIASAAD

SEQ ID NO: 34245 - protein, 10 aa, Artificial Sequence
  Description of Artificial Sequence: Synthetic epitope
PTGTALLETS

SEQ ID NO: 34246 - protein, 10 aa, Artificial Sequence
  Description of Artificial Sequence: Synthetic epitope
PTGTVLTDKS

SEQ ID NO: 34247 - protein, 10 aa, Artificial Sequence
  Description of Artificial Sequence: Synthetic epitope
PTHVAELATM

SEQ ID NO: 34248 - protein, 10 aa, Artificial Sequence
  Description of Artificial Sequence: Synthetic epitope
PTIESLIGES

SEQ ID NO: 34249 - protein, 10 aa, Artificial Sequence
  Description of Artificial Sequence: Synthetic epitope
PTIVNFPITN

SEQ ID NO: 34250 - protein, 10 aa, Artificial Sequence
  Description of Artificial Sequence: Synthetic epitope
PTKAMATQEL

SEQ ID NO: 34251 - protein, 10 aa, Artificial Sequence
  Description of Artificial Sequence: Synthetic epitope
PTKAVKTTGV

SEQ ID NO: 34252 - protein, 10 aa, Artificial Sequence
  Description of Artificial Sequence: Synthetic epitope
PTKETNNIPN

SEQ ID NO: 34253 - protein, 10 aa, Artificial Sequence
  Description of Artificial Sequence: Synthetic epitope
PTKFKVTNVD

SEQ ID NO: 34254 - protein, 10 aa, Artificial Sequence
  Description of Artificial Sequence: Synthetic epitope
PTKGKRDQKE

SEQ ID NO: 34255 - protein, 10 aa, Artificial Sequence
  Description of Artificial Sequence: Synthetic epitope
PTKSKGSKSS

SEQ ID NO: 34256 - protein, 10 aa, Artificial Sequence
  Description of Artificial Sequence: Synthetic epitope
PTKSTSYVRT

SEQ ID NO: 34257 - protein, 10 aa, Artificial Sequence
  Description of Artificial Sequence: Synthetic epitope
PTKTLQPSNP

SEQ ID NO: 34258 - protein, 10 aa, Artificial Sequence
  Description of Artificial Sequence: Synthetic epitope
PTLDSTASSL

SEQ ID NO: 34259 - protein, 10 aa, Artificial Sequence
  Description of Artificial Sequence: Synthetic epitope
PTLEKTKSTS

SEQ ID NO: 34260 - protein, 10 aa, Artificial Sequence
  Description of Artificial Sequence: Synthetic epitope
PTLELESQRE

SEQ ID NO: 34261 - protein, 10 aa, Artificial Sequence
  Description of Artificial Sequence: Synthetic epitope
PTLGGATSSH

SEQ ID NO: 34262 - protein, 10 aa, Artificial Sequence
  Description of Artificial Sequence: Synthetic epitope
PTLISSKTDS

SEQ ID NO: 34263 - protein, 10 aa, Artificial Sequence
  Description of Artificial Sequence: Synthetic epitope
PTLKTDATTA

SEQ ID NO: 34264 - protein, 10 aa, Artificial Sequence
  Description of Artificial Sequence: Synthetic epitope
PTLLKMTSSP

SEQ ID NO: 34265 - protein, 10 aa, Artificial Sequence
  Description of Artificial Sequence: Synthetic epitope
PTLLRALAPD

SEQ ID NO: 34266 - protein, 10 aa, Artificial Sequence
  Description of Artificial Sequence: Synthetic epitope
PTLLSLSLVR

SEQ ID NO: 34267 - protein, 10 aa, Artificial Sequence
  Description of Artificial Sequence: Synthetic epitope
PTLQINKLQP

SEQ ID NO: 34268 - protein, 10 aa, Artificial Sequence
  Description of Artificial Sequence: Synthetic epitope
PTLQSTSSTN

SEQ ID NO: 34269 - protein, 10 aa, Artificial Sequence
  Description of Artificial Sequence: Synthetic epitope
PTLSAQSSQP

SEQ ID NO: 34270 - protein, 10 aa, Artificial Sequence
  Description of Artificial Sequence: Synthetic epitope
PTLSASDPSL

SEQ ID NO: 34271 - protein, 10 aa, Artificial Sequence
  Description of Artificial Sequence: Synthetic epitope
PTLSEKKHQD

SEQ ID NO: 34272 - protein, 10 aa, Artificial Sequence
  Description of Artificial Sequence: Synthetic epitope
PTLTKGATVA

SEQ ID NO: 34273 - protein, 10 aa, Artificial Sequence
  Description of Artificial Sequence: Synthetic epitope
PTMAEVNGEQ

SEQ ID NO: 34274 - protein, 10 aa, Artificial Sequence
  Description of Artificial Sequence: Synthetic epitope
PTMARITGPP

SEQ ID NO: 34275 - protein, 10 aa, Artificial Sequence
  Description of Artificial Sequence: Synthetic epitope
PTMLAVLDLW

SEQ ID NO: 34276 - protein, 10 aa, Artificial Sequence
  Description of Artificial Sequence: Synthetic epitope
PTMNSYFYKF

SEQ ID NO: 34277 - protein, 10 aa, Artificial Sequence
  Description of Artificial Sequence: Synthetic epitope
PTNERYTLHQ

SEQ ID NO: 34278 - protein, 10 aa, Artificial Sequence
  Description of Artificial Sequence: Synthetic epitope
PTNGAETVAE

SEQ ID NO: 34279 - protein, 10 aa, Artificial Sequence
  Description of Artificial Sequence: Synthetic epitope
PTNQEKMPTS

SEQ ID NO: 34280 - protein, 10 aa, Artificial Sequence
  Description of Artificial Sequence: Synthetic epitope
PTNTERTEQK

SEQ ID NO: 34281 - protein, 10 aa, Artificial Sequence
  Description of Artificial Sequence: Synthetic epitope
PTNTVSSAKP

SEQ ID NO: 34282 - protein, 10 aa, Artificial Sequence
  Description of Artificial Sequence: Synthetic epitope
PTNVSEYNAA

SEQ ID NO: 34283 - protein, 10 aa, Artificial Sequence
  Description of Artificial Sequence: Synthetic epitope
PTPANAAKSP

SEQ ID NO: 34284 - protein, 10 aa, Artificial Sequence
  Description of Artificial Sequence: Synthetic epitope
PTPASIPLFQ

SEQ ID NO: 34285 - protein, 10 aa, Artificial Sequence
  Description of Artificial Sequence: Synthetic epitope
PTPGKWGQPK

SEQ ID NO: 34286 - protein, 10 aa, Artificial Sequence
  Description of Artificial Sequence: Synthetic epitope
PTPLEQSAGA

SEQ ID NO: 34287 - protein, 10 aa, Artificial Sequence
  Description of Artificial Sequence: Synthetic epitope
PTPPITFLAN

SEQ ID NO: 34288 - protein, 10 aa, Artificial Sequence
  Description of Artificial Sequence: Synthetic epitope
PTPREKVAME

SEQ ID NO: 34289 - protein, 10 aa, Artificial Sequence
  Description of Artificial Sequence: Synthetic epitope
PTPSSTTKLP

SEQ ID NO: 34290 - protein, 10 aa, Artificial Sequence
  Description of Artificial Sequence: Synthetic epitope
PTPTARFEQR

SEQ ID NO: 34291 - protein, 10 aa, Artificial Sequence
  Description of Artificial Sequence: Synthetic epitope
PTPTNVTIES

SEQ ID NO: 34292 - protein, 10 aa, Artificial Sequence
  Description of Artificial Sequence: Synthetic epitope
PTPTSSNTQE

SEQ ID NO: 34293 - protein, 10 aa, Artificial Sequence
  Description of Artificial Sequence: Synthetic epitope
PTPVRAEAED

SEQ ID NO: 34294 - protein, 10 aa, Artificial Sequence
  Description of Artificial Sequence: Synthetic epitope
PTPVSTELSE

SEQ ID NO: 34295 - protein, 10 aa, Artificial Sequence
  Description of Artificial Sequence: Synthetic epitope
PTQKTQKEIH

SEQ ID NO: 34296 - protein, 10 aa, Artificial Sequence
  Description of Artificial Sequence: Synthetic epitope
PTQNARETEA

SEQ ID NO: 34297 - protein, 10 aa, Artificial Sequence
  Description of Artificial Sequence: Synthetic epitope
PTQVNNSIKP

SEQ ID NO: 34298 - protein, 10 aa, Artificial Sequence
  Description of Artificial Sequence: Synthetic epitope
PTQVREKVKY

SEQ ID NO: 34299 - protein, 10 aa, Artificial Sequence
  Description of Artificial Sequence: Synthetic epitope
PTRATATVAS

SEQ ID NO: 34300 - protein, 10 aa, Artificial Sequence
  Description of Artificial Sequence: Synthetic epitope
PTRATRKRRH

SEQ ID NO: 34301 - protein, 10 aa, Artificial Sequence
  Description of Artificial Sequence: Synthetic epitope
PTREVFLEAM

SEQ ID NO: 34302 - protein, 10 aa, Artificial Sequence
  Description of Artificial Sequence: Synthetic epitope
PTRKYGITED

SEQ ID NO: 34303 - protein, 10 aa, Artificial Sequence
  Description of Artificial Sequence: Synthetic epitope
PTRQASQAGP

SEQ ID NO: 34304 - protein, 10 aa, Artificial Sequence
  Description of Artificial Sequence: Synthetic epitope
PTRQDESIQR

SEQ ID NO: 34305 - protein, 10 aa, Artificial Sequence
  Description of Artificial Sequence: Synthetic epitope
PTRRGMKGSS

SEQ ID NO: 34306 - protein, 10 aa, Artificial Sequence
  Description of Artificial Sequence: Synthetic epitope
PTRRSTRNTR

SEQ ID NO: 34307 - protein, 10 aa, Artificial Sequence
  Description of Artificial Sequence: Synthetic epitope
PTRSSTLETT

SEQ ID NO: 34308 - protein, 10 aa, Artificial Sequence
  Description of Artificial Sequence: Synthetic epitope
PTSAMVLQQH

SEQ ID NO: 34309 - protein, 10 aa, Artificial Sequence
  Description of Artificial Sequence: Synthetic epitope
PTSAQHVWLE

SEQ ID NO: 34310 - protein, 10 aa, Artificial Sequence
  Description of Artificial Sequence: Synthetic epitope
PTSASEVATQ

SEQ ID NO: 34311 - protein, 10 aa, Artificial Sequence
  Description of Artificial Sequence: Synthetic epitope
PTSDRKAKTA

SEQ ID NO: 34312 - protein, 10 aa, Artificial Sequence
  Description of Artificial Sequence: Synthetic epitope
PTSEMLLRRL

SEQ ID NO: 34313 - protein, 10 aa, Artificial Sequence
  Description of Artificial Sequence: Synthetic epitope
PTSENEQKQA

SEQ ID NO: 34314 - protein, 10 aa, Artificial Sequence
  Description of Artificial Sequence: Synthetic epitope
PTSIKEVYKD

SEQ ID NO: 34315 - protein, 10 aa, Artificial Sequence
  Description of Artificial Sequence: Synthetic epitope
PTSIRGFSMH

SEQ ID NO: 34316 - protein, 10 aa, Artificial Sequence
  Description of Artificial Sequence: Synthetic epitope
PTSKALTRSD

SEQ ID NO: 34317 - protein, 10 aa, Artificial Sequence
  Description of Artificial Sequence: Synthetic epitope
PTSKYTKSPG

SEQ ID NO: 34318 - protein, 10 aa, Artificial Sequence
  Description of Artificial Sequence: Synthetic epitope
PTSLFTSSTP

SEQ ID NO: 34319 - protein, 10 aa, Artificial Sequence
  Description of Artificial Sequence: Synthetic epitope
PTSMATVQKQ

SEQ ID NO: 34320 - protein, 10 aa, Artificial Sequence
  Description of Artificial Sequence: Synthetic epitope
PTSNQVLDTS

SEQ ID NO: 34321 - protein, 10 aa, Artificial Sequence
  Description of Artificial Sequence: Synthetic epitope
PTSPKATADR

SEQ ID NO: 34322 - protein, 10 aa, Artificial Sequence
  Description of Artificial Sequence: Synthetic epitope
PTSQIDNIGE

SEQ ID NO: 34323 - protein, 10 aa, Artificial Sequence
  Description of Artificial Sequence: Synthetic epitope
PTSRGLSSGT

SEQ ID NO: 34324 - protein, 10 aa, Artificial Sequence
  Description of Artificial Sequence: Synthetic epitope
PTSRSKNVTN

SEQ ID NO: 34325 - protein, 10 aa, Artificial Sequence
  Description of Artificial Sequence: Synthetic epitope
PTSSKRSQQH

SEQ ID NO: 34326 - protein, 10 aa, Artificial Sequence
  Description of Artificial Sequence: Synthetic epitope
PTSSQTATSQ

SEQ ID NO: 34327 - protein, 10 aa, Artificial Sequence
  Description of Artificial Sequence: Synthetic epitope
PTSTSETPDY

SEQ ID NO: 34328 - protein, 10 aa, Artificial Sequence
  Description of Artificial Sequence: Synthetic epitope
PTSTVLITSP

SEQ ID NO: 34329 - protein, 10 aa, Artificial Sequence
  Description of Artificial Sequence: Synthetic epitope
PTSVASVVTS

SEQ ID NO: 34330 - protein, 10 aa, Artificial Sequence
  Description of Artificial Sequence: Synthetic epitope
PTSVKSEPRA

SEQ ID NO: 34331 - protein, 10 aa, Artificial Sequence
  Description of Artificial Sequence: Synthetic epitope
PTSWELSERY

SEQ ID NO: 34332 - protein, 10 aa, Artificial Sequence
  Description of Artificial Sequence: Synthetic epitope
PTTAASSVEE

SEQ ID NO: 34333 - protein, 10 aa, Artificial Sequence
  Description of Artificial Sequence: Synthetic epitope
PTTAKRRLKQ

SEQ ID NO: 34334 - protein, 10 aa, Artificial Sequence
  Description of Artificial Sequence: Synthetic epitope
PTTAMSSERI

SEQ ID NO: 34335 - protein, 10 aa, Artificial Sequence
  Description of Artificial Sequence: Synthetic epitope
PTTASKPAKK

SEQ ID NO: 34336 - protein, 10 aa, Artificial Sequence
  Description of Artificial Sequence: Synthetic epitope
PTTAVEATVG

SEQ ID NO: 34337 - protein, 10 aa, Artificial Sequence
  Description of Artificial Sequence: Synthetic epitope
PTTFKQQRST

SEQ ID NO: 34338 - protein, 10 aa, Artificial Sequence
  Description of Artificial Sequence: Synthetic epitope
PTTKASQLSV

SEQ ID NO: 34339 - protein, 10 aa, Artificial Sequence
  Description of Artificial Sequence: Synthetic epitope
PTTKELAKRQ

SEQ ID NO: 34340 - protein, 10 aa, Artificial Sequence
  Description of Artificial Sequence: Synthetic epitope
PTTNASLLTK

SEQ ID NO: 34341 - protein, 10 aa, Artificial Sequence
  Description of Artificial Sequence: Synthetic epitope
PTTNNSVSKE

SEQ ID NO: 34342 - protein, 10 aa, Artificial Sequence
  Description of Artificial Sequence: Synthetic epitope
PTTSAAQEER

SEQ ID NO: 34343 - protein, 10 aa, Artificial Sequence
  Description of Artificial Sequence: Synthetic epitope
PTTSARMESQ

SEQ ID NO: 34344 - protein, 10 aa, Artificial Sequence
  Description of Artificial Sequence: Synthetic epitope
PTTSRAKQGP

SEQ ID NO: 34345 - protein, 10 aa, Artificial Sequence
  Description of Artificial Sequence: Synthetic epitope
PTTSSENMRD

SEQ ID NO: 34346 - protein, 10 aa, Artificial Sequence
  Description of Artificial Sequence: Synthetic epitope
PTTYQEVSIK

SEQ ID NO: 34347 - protein, 10 aa, Artificial Sequence
  Description of Artificial Sequence: Synthetic epitope
PTVASRLSDT

SEQ ID NO: 34348 - protein, 10 aa, Artificial Sequence
  Description of Artificial Sequence: Synthetic epitope
PTVATSVQSP

SEQ ID NO: 34349 - protein, 10 aa, Artificial Sequence
  Description of Artificial Sequence: Synthetic epitope
PTVDQLEEVE

SEQ ID NO: 34350 - protein, 10 aa, Artificial Sequence
  Description of Artificial Sequence: Synthetic epitope
PTVEVTEKVN

SEQ ID NO: 34351 - protein, 10 aa, Artificial Sequence
  Description of Artificial Sequence: Synthetic epitope
PTVNMGQKQE

SEQ ID NO: 34352 - protein, 10 aa, Artificial Sequence
  Description of Artificial Sequence: Synthetic epitope
PTVPPRNFEK

SEQ ID NO: 34353 - protein, 10 aa, Artificial Sequence
  Description of Artificial Sequence: Synthetic epitope
PTVQKALAST

SEQ ID NO: 34354 - protein, 10 aa, Artificial Sequence
  Description of Artificial Sequence: Synthetic epitope
PTVRKERVVR

SEQ ID NO: 34355 - protein, 10 aa, Artificial Sequence
  Description of Artificial Sequence: Synthetic epitope
PTVSSDLENI

SEQ ID NO: 34356 - protein, 10 aa, Artificial Sequence
  Description of Artificial Sequence: Synthetic epitope
PTVTSSKATP

SEQ ID NO: 34357 - protein, 10 aa, Artificial Sequence
  Description of Artificial Sequence: Synthetic epitope
PTVTSSKATP

SEQ ID NO: 34358 - protein, 10 aa, Artificial Sequence
  Description of Artificial Sequence: Synthetic epitope
PTVVESAETN

SEQ ID NO: 34359 - protein, 10 aa, Artificial Sequence
  Description of Artificial Sequence: Synthetic epitope
PTVVNSNKSE

SEQ ID NO: 34360 - protein, 10 aa, Artificial Sequence
  Description of Artificial Sequence: Synthetic epitope
PTVVRPPKQL

SEQ ID NO: 34361 - protein, 10 aa, Artificial Sequence
  Description of Artificial Sequence: Synthetic epitope
PTWALQQLQQ

SEQ ID NO: 34362 - protein, 10 aa, Artificial Sequence
  Description of Artificial Sequence: Synthetic epitope
PTWRQGIQRR

SEQ ID NO: 34363 - protein, 10 aa, Artificial Sequence
  Description of Artificial Sequence: Synthetic epitope
PVAAGEVVKT

SEQ ID NO: 34364 - protein, 10 aa, Artificial Sequence
  Description of Artificial Sequence: Synthetic epitope
PVAASIASTS

SEQ ID NO: 34365 - protein, 10 aa, Artificial Sequence
  Description of Artificial Sequence: Synthetic epitope
PVAASYSAVT

SEQ ID NO: 34366 - protein, 10 aa, Artificial Sequence
  Description of Artificial Sequence: Synthetic epitope
PVAEANAASM

SEQ ID NO: 34367 - protein, 10 aa, Artificial Sequence
  Description of Artificial Sequence: Synthetic epitope
PVAETSSIGN

SEQ ID NO: 34368 - protein, 10 aa, Artificial Sequence
  Description of Artificial Sequence: Synthetic epitope
PVAEVYKKVW

SEQ ID NO: 34369 - protein, 10 aa, Artificial Sequence
  Description of Artificial Sequence: Synthetic epitope
PVAFKLVQQN

SEQ ID NO: 34370 - protein, 10 aa, Artificial Sequence
  Description of Artificial Sequence: Synthetic epitope
PVAGTISYNS

SEQ ID NO: 34371 - protein, 10 aa, Artificial Sequence
  Description of Artificial Sequence: Synthetic epitope
PVAKAASQTA

SEQ ID NO: 34372 - protein, 10 aa, Artificial Sequence
  Description of Artificial Sequence: Synthetic epitope
PVAKVMALED

SEQ ID NO: 34373 - protein, 10 aa, Artificial Sequence
  Description of Artificial Sequence: Synthetic epitope
PVAMSLSADK

SEQ ID NO: 34374 - protein, 10 aa, Artificial Sequence
  Description of Artificial Sequence: Synthetic epitope
PVAQMTLTLK

SEQ ID NO: 34375 - protein, 10 aa, Artificial Sequence
  Description of Artificial Sequence: Synthetic epitope
PVARQTSQIG

SEQ ID NO: 34376 - protein, 10 aa, Artificial Sequence
  Description of Artificial Sequence: Synthetic epitope
PVASALSRAD

SEQ ID NO: 34377 - protein, 10 aa, Artificial Sequence
  Description of Artificial Sequence: Synthetic epitope
PVASTATSTK

SEQ ID NO: 34378 - protein, 10 aa, Artificial Sequence
  Description of Artificial Sequence: Synthetic epitope
PVATVELEEK

SEQ ID NO: 34379 - protein, 10 aa, Artificial Sequence
  Description of Artificial Sequence: Synthetic epitope
PVAVAKAQPR

SEQ ID NO: 34380 - protein, 10 aa, Artificial Sequence
  Description of Artificial Sequence: Synthetic epitope
PVDGDEDRNP

SEQ ID NO: 34381 - protein, 10 aa, Artificial Sequence
  Description of Artificial Sequence: Synthetic epitope
PVDKTSNTLR

SEQ ID NO: 34382 - protein, 10 aa, Artificial Sequence
  Description of Artificial Sequence: Synthetic epitope
PVDQASESLL

SEQ ID NO: 34383 - protein, 10 aa, Artificial Sequence
  Description of Artificial Sequence: Synthetic epitope
PVDRKRSQEP

SEQ ID NO: 34384 - protein, 10 aa, Artificial Sequence
  Description of Artificial Sequence: Synthetic epitope
PVDRQETKQT

SEQ ID NO: 34385 - protein, 10 aa, Artificial Sequence
  Description of Artificial Sequence: Synthetic epitope
PVDSALGSSR

SEQ ID NO: 34386 - protein, 10 aa, Artificial Sequence
  Description of Artificial Sequence: Synthetic epitope
PVDSGRSNRT

SEQ ID NO: 34387 - protein, 10 aa, Artificial Sequence
  Description of Artificial Sequence: Synthetic epitope
PVEAASEALR

SEQ ID NO: 34388 - protein, 10 aa, Artificial Sequence
  Description of Artificial Sequence: Synthetic epitope
PVEDDESQNN

SEQ ID NO: 34389 - protein, 10 aa, Artificial Sequence
  Description of Artificial Sequence: Synthetic epitope
PVEELTVDSP

SEQ ID NO: 34390 - protein, 10 aa, Artificial Sequence
  Description of Artificial Sequence: Synthetic epitope
PVEKEAEPMD

SEQ ID NO: 34391 - protein, 10 aa, Artificial Sequence
  Description of Artificial Sequence: Synthetic epitope
PVELESLSNE

SEQ ID NO: 34392 - protein, 10 aa, Artificial Sequence
  Description of Artificial Sequence: Synthetic epitope
PVEQAQKIIE

SEQ ID NO: 34393 - protein, 10 aa, Artificial Sequence
  Description of Artificial Sequence: Synthetic epitope
PVEQDTSNVT

SEQ ID NO: 34394 - protein, 10 aa, Artificial Sequence
  Description of Artificial Sequence: Synthetic epitope
PVERNAEPDE

SEQ ID NO: 34395 - protein, 10 aa, Artificial Sequence
  Description of Artificial Sequence: Synthetic epitope
PVESDSSVRD

SEQ ID NO: 34396 - protein, 10 aa, Artificial Sequence
  Description of Artificial Sequence: Synthetic epitope
PVESELALFQ

SEQ ID NO: 34397 - protein, 10 aa, Artificial Sequence
  Description of Artificial Sequence: Synthetic epitope
PVESQMEELT

SEQ ID NO: 34398 - protein, 10 aa, Artificial Sequence
  Description of Artificial Sequence: Synthetic epitope
PVESQTPMDV

SEQ ID NO: 34399 - protein, 10 aa, Artificial Sequence
  Description of Artificial Sequence: Synthetic epitope
PVESSKSASP

SEQ ID NO: 34400 - protein, 10 aa, Artificial Sequence
  Description of Artificial Sequence: Synthetic epitope
PVETANVTMQ

SEQ ID NO: 34401 - protein, 10 aa, Artificial Sequence
  Description of Artificial Sequence: Synthetic epitope
PVETKYPLMQ

SEQ ID NO: 34402 - protein, 10 aa, Artificial Sequence
  Description of Artificial Sequence: Synthetic epitope
PVEVKPKARL

SEQ ID NO: 34403 - protein, 10 aa, Artificial Sequence
  Description of Artificial Sequence: Synthetic epitope
PVFDTMSAPL

SEQ ID NO: 34404 - protein, 10 aa, Artificial Sequence
  Description of Artificial Sequence: Synthetic epitope
PVFKAVSFKS

SEQ ID NO: 34405 - protein, 10 aa, Artificial Sequence
  Description of Artificial Sequence: Synthetic epitope
PVFKMKIRKE

SEQ ID NO: 34406 - protein, 10 aa, Artificial Sequence
  Description of Artificial Sequence: Synthetic epitope
PVFQSQIAPE

SEQ ID NO: 34407 - protein, 10 aa, Artificial Sequence
  Description of Artificial Sequence: Synthetic epitope
PVGLSLKEQG

SEQ ID NO: 34408 - protein, 10 aa, Artificial Sequence
  Description of Artificial Sequence: Synthetic epitope
PVGNREEKIL

SEQ ID NO: 34409 - protein, 10 aa, Artificial Sequence
  Description of Artificial Sequence: Synthetic epitope
PVGRKNRERV

SEQ ID NO: 34410 - protein, 10 aa, Artificial Sequence
  Description of Artificial Sequence: Synthetic epitope
PVHEVMVPAK

SEQ ID NO: 34411 - protein, 10 aa, Artificial Sequence
  Description of Artificial Sequence: Synthetic epitope
PVHNKSEPAW

SEQ ID NO: 34412 - protein, 10 aa, Artificial Sequence
  Description of Artificial Sequence: Synthetic epitope
PVHSQENRIT

SEQ ID NO: 34413 - protein, 10 aa, Artificial Sequence
  Description of Artificial Sequence: Synthetic epitope
PVIEVETEKK

SEQ ID NO: 34414 - protein, 10 aa, Artificial Sequence
  Description of Artificial Sequence: Synthetic epitope
PVILPEMYKI

SEQ ID NO: 34415 - protein, 10 aa, Artificial Sequence
  Description of Artificial Sequence: Synthetic epitope
PVIMEGVQEE

SEQ ID NO: 34416 - protein, 10 aa, Artificial Sequence
  Description of Artificial Sequence: Synthetic epitope
PVINSYLLAE

SEQ ID NO: 34417 - protein, 10 aa, Artificial Sequence
  Description of Artificial Sequence: Synthetic epitope
PVIRKLAKTQ

SEQ ID NO: 34418 - protein, 10 aa, Artificial Sequence
  Description of Artificial Sequence: Synthetic epitope
PVISESEVFQ

SEQ ID NO: 34419 - protein, 10 aa, Artificial Sequence
  Description of Artificial Sequence: Synthetic epitope
PVISSAVLLS

SEQ ID NO: 34420 - protein, 10 aa, Artificial Sequence
  Description of Artificial Sequence: Synthetic epitope
PVITEETTLQ

SEQ ID NO: 34421 - protein, 10 aa, Artificial Sequence
  Description of Artificial Sequence: Synthetic epitope
PVITSSKEEQ

SEQ ID NO: 34422 - protein, 10 aa, Artificial Sequence
  Description of Artificial Sequence: Synthetic epitope
PVKAEVSPHG

SEQ ID NO: 34423 - protein, 10 aa, Artificial Sequence
  Description of Artificial Sequence: Synthetic epitope
PVKAMEVVNS

SEQ ID NO: 34424 - protein, 10 aa, Artificial Sequence
  Description of Artificial Sequence: Synthetic epitope
PVKAMLNISE

SEQ ID NO: 34425 - protein, 10 aa, Artificial Sequence
  Description of Artificial Sequence: Synthetic epitope
PVKDASLRSR

SEQ ID NO: 34426 - protein, 10 aa, Artificial Sequence
  Description of Artificial Sequence: Synthetic epitope
PVKHSKHVIR

SEQ ID NO: 34427 - protein, 10 aa, Artificial Sequence
  Description of Artificial Sequence: Synthetic epitope
PVKIALARNN

SEQ ID NO: 34428 - protein, 10 aa, Artificial Sequence
  Description of Artificial Sequence: Synthetic epitope
PVKIAVIFKQ

SEQ ID NO: 34429 - protein, 10 aa, Artificial Sequence
  Description of Artificial Sequence: Synthetic epitope
PVKKAKATAR

SEQ ID NO: 34430 - protein, 10 aa, Artificial Sequence
  Description of Artificial Sequence: Synthetic epitope
PVKKATVVYQ

SEQ ID NO: 34431 - protein, 10 aa, Artificial Sequence
  Description of Artificial Sequence: Synthetic epitope
PVKKSMREKA

SEQ ID NO: 34432 - protein, 10 aa, Artificial Sequence
  Description of Artificial Sequence: Synthetic epitope
PVKLYEWREP

SEQ ID NO: 34433 - protein, 10 aa, Artificial Sequence
  Description of Artificial Sequence: Synthetic epitope
PVKPHNKSFA

SEQ ID NO: 34434 - protein, 10 aa, Artificial Sequence
  Description of Artificial Sequence: Synthetic epitope
PVKPKAKSSA

SEQ ID NO: 34435 - protein, 10 aa, Artificial Sequence
  Description of Artificial Sequence: Synthetic epitope
PVKPKRSISI

SEQ ID NO: 34436 - protein, 10 aa, Artificial Sequence
  Description of Artificial Sequence: Synthetic epitope
PVKPKTKVKQ

SEQ ID NO: 34437 - protein, 10 aa, Artificial Sequence
  Description of Artificial Sequence: Synthetic epitope
PVKQEAMDPV

SEQ ID NO: 34438 - protein, 10 aa, Artificial Sequence
  Description of Artificial Sequence: Synthetic epitope
PVKQQFDWNQ

SEQ ID NO: 34439 - protein, 10 aa, Artificial Sequence
  Description of Artificial Sequence: Synthetic epitope
PVKSNPVVSQ

SEQ ID NO: 34440 - protein, 10 aa, Artificial Sequence
  Description of Artificial Sequence: Synthetic epitope
PVKSSEGSQQ

SEQ ID NO: 34441 - protein, 10 aa, Artificial Sequence
  Description of Artificial Sequence: Synthetic epitope
PVKTRGKLSS

SEQ ID NO: 34442 - protein, 10 aa, Artificial Sequence
  Description of Artificial Sequence: Synthetic epitope
PVLAANSFRA

SEQ ID NO: 34443 - protein, 10 aa, Artificial Sequence
  Description of Artificial Sequence: Synthetic epitope
PVLEALVARA

SEQ ID NO: 34444 - protein, 10 aa, Artificial Sequence
  Description of Artificial Sequence: Synthetic epitope
PVLEEKERSA

SEQ ID NO: 34445 - protein, 10 aa, Artificial Sequence
  Description of Artificial Sequence: Synthetic epitope
PVLLSLYMST

SEQ ID NO: 34446 - protein, 10 aa, Artificial Sequence
  Description of Artificial Sequence: Synthetic epitope
PVLLVELIKL

SEQ ID NO: 34447 - protein, 10 aa, Artificial Sequence
  Description of Artificial Sequence: Synthetic epitope
PVLNTKKALK

SEQ ID NO: 34448 - protein, 10 aa, Artificial Sequence
  Description of Artificial Sequence: Synthetic epitope
PVLRPPITTS

SEQ ID NO: 34449 - protein, 10 aa, Artificial Sequence
  Description of Artificial Sequence: Synthetic epitope
PVLSTDKFKT

SEQ ID NO: 34450 - protein, 10 aa, Artificial Sequence
  Description of Artificial Sequence: Synthetic epitope
PVLTSVALNA

SEQ ID NO: 34451 - protein, 10 aa, Artificial Sequence
  Description of Artificial Sequence: Synthetic epitope
PVLWPEYTFW

SEQ ID NO: 34452 - protein, 10 aa, Artificial Sequence
  Description of Artificial Sequence: Synthetic epitope
PVMKKLVPVR

SEQ ID NO: 34453 - protein, 10 aa, Artificial Sequence
  Description of Artificial Sequence: Synthetic epitope
PVNAKFSIMP

SEQ ID NO: 34454 - protein, 10 aa, Artificial Sequence
  Description of Artificial Sequence: Synthetic epitope
PVNASASVQN

SEQ ID NO: 34455 - protein, 10 aa, Artificial Sequence
  Description of Artificial Sequence: Synthetic epitope
PVNASKDILL

SEQ ID NO: 34456 - protein, 10 aa, Artificial Sequence
  Description of Artificial Sequence: Synthetic epitope
PVNDTKGVAI

SEQ ID NO: 34457 - protein, 10 aa, Artificial Sequence
  Description of Artificial Sequence: Synthetic epitope
PVNEAAIRKI

SEQ ID NO: 34458 - protein, 10 aa, Artificial Sequence
  Description of Artificial Sequence: Synthetic epitope
PVPAVVSLPR

SEQ ID NO: 34459 - protein, 10 aa, Artificial Sequence
  Description of Artificial Sequence: Synthetic epitope
PVPEATGKGQ

SEQ ID NO: 34460 - protein, 10 aa, Artificial Sequence
  Description of Artificial Sequence: Synthetic epitope
PVPSAEAFRW

SEQ ID NO: 34461 - protein, 10 aa, Artificial Sequence
  Description of Artificial Sequence: Synthetic epitope
PVQAQATSVG

SEQ ID NO: 34462 - protein, 10 aa, Artificial Sequence
  Description of Artificial Sequence: Synthetic epitope
PVQEEKLSAS

SEQ ID NO: 34463 - protein, 10 aa, Artificial Sequence
  Description of Artificial Sequence: Synthetic epitope
PVQGAKSKQG

SEQ ID NO: 34464 - protein, 10 aa, Artificial Sequence
  Description of Artificial Sequence: Synthetic epitope
PVQKAASRTL

SEQ ID NO: 34465 - protein, 10 aa, Artificial Sequence
  Description of Artificial Sequence: Synthetic epitope
PVQKQKKQQT

SEQ ID NO: 34466 - protein, 10 aa, Artificial Sequence
  Description of Artificial Sequence: Synthetic epitope
PVQQGVIIKR

SEQ ID NO: 34467 - protein, 10 aa, Artificial Sequence
  Description of Artificial Sequence: Synthetic epitope
PVQQSKRGTM

SEQ ID NO: 34468 - protein, 10 aa, Artificial Sequence
  Description of Artificial Sequence: Synthetic epitope
PVQSIRSPKS

SEQ ID NO: 34469 - protein, 10 aa, Artificial Sequence
  Description of Artificial Sequence: Synthetic epitope
PVQSPLATAA

SEQ ID NO: 34470 - protein, 10 aa, Artificial Sequence
  Description of Artificial Sequence: Synthetic epitope
PVQTSAVTGQ

SEQ ID NO: 34471 - protein, 10 aa, Artificial Sequence
  Description of Artificial Sequence: Synthetic epitope
PVQVETAKKS

SEQ ID NO: 34472 - protein, 10 aa, Artificial Sequence
  Description of Artificial Sequence: Synthetic epitope
PVQVNRLPRE

SEQ ID NO: 34473 - protein, 10 aa, Artificial Sequence
  Description of Artificial Sequence: Synthetic epitope
PVRDSDKPET

SEQ ID NO: 34474 - protein, 10 aa, Artificial Sequence
  Description of Artificial Sequence: Synthetic epitope
PVRKETKQDT

SEQ ID NO: 34475 - protein, 10 aa, Artificial Sequence
  Description of Artificial Sequence: Synthetic epitope
PVRKEVSVRT

SEQ ID NO: 34476 - protein, 10 aa, Artificial Sequence
  Description of Artificial Sequence: Synthetic epitope
PVRSILKSQA

SEQ ID NO: 34477 - protein, 10 aa, Artificial Sequence
  Description of Artificial Sequence: Synthetic epitope
PVRTKTSNRY

SEQ ID NO: 34478 - protein, 10 aa, Artificial Sequence
  Description of Artificial Sequence: Synthetic epitope
PVSAETLLSQ

SEQ ID NO: 34479 - protein, 10 aa, Artificial Sequence
  Description of Artificial Sequence: Synthetic epitope
PVSASTHIAS

SEQ ID NO: 34480 - protein, 10 aa, Artificial Sequence
  Description of Artificial Sequence: Synthetic epitope
PVSAVSSDIT

SEQ ID NO: 34481 - protein, 10 aa, Artificial Sequence
  Description of Artificial Sequence: Synthetic epitope
PVSEDFKSEP

SEQ ID NO: 34482 - protein, 10 aa, Artificial Sequence
  Description of Artificial Sequence: Synthetic epitope
PVSKSLETLL

SEQ ID NO: 34483 - protein, 10 aa, Artificial Sequence
  Description of Artificial Sequence: Synthetic epitope
PVSLHDERRQ

SEQ ID NO: 34484 - protein, 10 aa, Artificial Sequence
  Description of Artificial Sequence: Synthetic epitope
PVSLSTNSSL

SEQ ID NO: 34485 - protein, 10 aa, Artificial Sequence
  Description of Artificial Sequence: Synthetic epitope
PVSMGLGDMQ

SEQ ID NO: 34486 - protein, 10 aa, Artificial Sequence
  Description of Artificial Sequence: Synthetic epitope
PVSQAAVSDA

SEQ ID NO: 34487 - protein, 10 aa, Artificial Sequence
  Description of Artificial Sequence: Synthetic epitope
PVSQNSEVGE

SEQ ID NO: 34488 - protein, 10 aa, Artificial Sequence
  Description of Artificial Sequence: Synthetic epitope
PVSRQNNEKM

SEQ ID NO: 34489 - protein, 10 aa, Artificial Sequence
  Description of Artificial Sequence: Synthetic epitope
PVSSMAGNTK

SEQ ID NO: 34490 - protein, 10 aa, Artificial Sequence
  Description of Artificial Sequence: Synthetic epitope
PVSSNNSLSA

SEQ ID NO: 34491 - protein, 10 aa, Artificial Sequence
  Description of Artificial Sequence: Synthetic epitope
PVSSTSSLEA

SEQ ID NO: 34492 - protein, 10 aa, Artificial Sequence
  Description of Artificial Sequence: Synthetic epitope
PVSSTVSVPL

SEQ ID NO: 34493 - protein, 10 aa, Artificial Sequence
  Description of Artificial Sequence: Synthetic epitope
PVSSVSNSLE

SEQ ID NO: 34494 - protein, 10 aa, Artificial Sequence
  Description of Artificial Sequence: Synthetic epitope
PVSTAATWQS

SEQ ID NO: 34495 - protein, 10 aa, Artificial Sequence
  Description of Artificial Sequence: Synthetic epitope
PVSTAVLEEQ

SEQ ID NO: 34496 - protein, 10 aa, Artificial Sequence
  Description of Artificial Sequence: Synthetic epitope
PVSTMNKEQQ

SEQ ID NO: 34497 - protein, 10 aa, Artificial Sequence
  Description of Artificial Sequence: Synthetic epitope
PVSTSKSRKE

SEQ ID NO: 34498 - protein, 10 aa, Artificial Sequence
  Description of Artificial Sequence: Synthetic epitope
PVSTVQVEPA

SEQ ID NO: 34499 - protein, 10 aa, Artificial Sequence
  Description of Artificial Sequence: Synthetic epitope
PVSVTQQSPA

SEQ ID NO: 34500 - protein, 10 aa, Artificial Sequence
  Description of Artificial Sequence: Synthetic epitope
PVTASLTGNG

SEQ ID NO: 34501 - protein, 10 aa, Artificial Sequence
  Description of Artificial Sequence: Synthetic epitope
PVTEQRVKHT

SEQ ID NO: 34502 - protein, 10 aa, Artificial Sequence
  Description of Artificial Sequence: Synthetic epitope
PVTGLTRDQS

SEQ ID NO: 34503 - protein, 10 aa, Artificial Sequence
  Description of Artificial Sequence: Synthetic epitope
PVTITSVAGQ

SEQ ID NO: 34504 - protein, 10 aa, Artificial Sequence
  Description of Artificial Sequence: Synthetic epitope
PVTKLTANDI

SEQ ID NO: 34505 - protein, 10 aa, Artificial Sequence
  Description of Artificial Sequence: Synthetic epitope
PVTLELSSNE

SEQ ID NO: 34506 - protein, 10 aa, Artificial Sequence
  Description of Artificial Sequence: Synthetic epitope
PVTLIDMDKA

SEQ ID NO: 34507 - protein, 10 aa, Artificial Sequence
  Description of Artificial Sequence: Synthetic epitope
PVTNRIVDNK

SEQ ID NO: 34508 - protein, 10 aa, Artificial Sequence
  Description of Artificial Sequence: Synthetic epitope
PVTQLAAVAA

SEQ ID NO: 34509 - protein, 10 aa, Artificial Sequence
  Description of Artificial Sequence: Synthetic epitope
PVTRALQREA

SEQ ID NO: 34510 - protein, 10 aa, Artificial Sequence
  Description of Artificial Sequence: Synthetic epitope
PVTSAEQESE

SEQ ID NO: 34511 - protein, 10 aa, Artificial Sequence
  Description of Artificial Sequence: Synthetic epitope
PVTTDAMPRT

SEQ ID NO: 34512 - protein, 10 aa, Artificial Sequence
  Description of Artificial Sequence: Synthetic epitope
PVTTEVSYAG

SEQ ID NO: 34513 - protein, 10 aa, Artificial Sequence
  Description of Artificial Sequence: Synthetic epitope
PVTTSSARGT

SEQ ID NO: 34514 - protein, 10 aa, Artificial Sequence
  Description of Artificial Sequence: Synthetic epitope
PVTTSSEASS

SEQ ID NO: 34515 - protein, 10 aa, Artificial Sequence
  Description of Artificial Sequence: Synthetic epitope
PVVDRRNLRR

SEQ ID NO: 34516 - protein, 10 aa, Artificial Sequence
  Description of Artificial Sequence: Synthetic epitope
PVVEATQNTE

SEQ ID NO: 34517 - protein, 10 aa, Artificial Sequence
  Description of Artificial Sequence: Synthetic epitope
PVVEGRPMRE

SEQ ID NO: 34518 - protein, 10 aa, Artificial Sequence
  Description of Artificial Sequence: Synthetic epitope
PVVEKVAIPM

SEQ ID NO: 34519 - protein, 10 aa, Artificial Sequence
  Description of Artificial Sequence: Synthetic epitope
PVVESARPNS

SEQ ID NO: 34520 - protein, 10 aa, Artificial Sequence
  Description of Artificial Sequence: Synthetic epitope
PVVGSRGEVA

SEQ ID NO: 34521 - protein, 10 aa, Artificial Sequence
  Description of Artificial Sequence: Synthetic epitope
PVVHLTLRQA

SEQ ID NO: 34522 - protein, 10 aa, Artificial Sequence
  Description of Artificial Sequence: Synthetic epitope
PVVKESSADL

SEQ ID NO: 34523 - protein, 10 aa, Artificial Sequence
  Description of Artificial Sequence: Synthetic epitope
PVVKNSITKN

SEQ ID NO: 34524 - protein, 10 aa, Artificial Sequence
  Description of Artificial Sequence: Synthetic epitope
PVVKTDSQQP

SEQ ID NO: 34525 - protein, 10 aa, Artificial Sequence
  Description of Artificial Sequence: Synthetic epitope
PVVKVSEIVA

SEQ ID NO: 34526 - protein, 10 aa, Artificial Sequence
  Description of Artificial Sequence: Synthetic epitope
PVVMTSMQDG

SEQ ID NO: 34527 - protein, 10 aa, Artificial Sequence
  Description of Artificial Sequence: Synthetic epitope
PVVSARSDAD

SEQ ID NO: 34528 - protein, 10 aa, Artificial Sequence
  Description of Artificial Sequence: Synthetic epitope
PVVSRNVSAD

SEQ ID NO: 34529 - protein, 10 aa, Artificial Sequence
  Description of Artificial Sequence: Synthetic epitope
PVVSRNVSAD

SEQ ID NO: 34530 - protein, 10 aa, Artificial Sequence
  Description of Artificial Sequence: Synthetic epitope
PVVSSTVSYD

SEQ ID NO: 34531 - protein, 10 aa, Artificial Sequence
  Description of Artificial Sequence: Synthetic epitope
PVVSVVRETE

SEQ ID NO: 34532 - protein, 10 aa, Artificial Sequence
  Description of Artificial Sequence: Synthetic epitope
PVYSNSSVRN

SEQ ID NO: 34533 - protein, 10 aa, Artificial Sequence
  Description of Artificial Sequence: Synthetic epitope
PVYSSRVKIS

SEQ ID NO: 34534 - protein, 10 aa, Artificial Sequence
  Description of Artificial Sequence: Synthetic epitope
PWAEYSEPKK

SEQ ID NO: 34535 - protein, 10 aa, Artificial Sequence
  Description of Artificial Sequence: Synthetic epitope
PWASRQNKPS

SEQ ID NO: 34536 - protein, 10 aa, Artificial Sequence
  Description of Artificial Sequence: Synthetic epitope
PWATAGAVRW

SEQ ID NO: 34537 - protein, 10 aa, Artificial Sequence
  Description of Artificial Sequence: Synthetic epitope
PWESEFIDSQ

SEQ ID NO: 34538 - protein, 10 aa, Artificial Sequence
  Description of Artificial Sequence: Synthetic epitope
PWESSRRKMG

SEQ ID NO: 34539 - protein, 10 aa, Artificial Sequence
  Description of Artificial Sequence: Synthetic epitope
PWFDFRKWYQ

SEQ ID NO: 34540 - protein, 10 aa, Artificial Sequence
  Description of Artificial Sequence: Synthetic epitope
PWFKSVEEFM

SEQ ID NO: 34541 - protein, 10 aa, Artificial Sequence
  Description of Artificial Sequence: Synthetic epitope
PWGLNLTEKI

SEQ ID NO: 34542 - protein, 10 aa, Artificial Sequence
  Description of Artificial Sequence: Synthetic epitope
PWGTKNHPTK

SEQ ID NO: 34543 - protein, 10 aa, Artificial Sequence
  Description of Artificial Sequence: Synthetic epitope
PWISKSVPRP

SEQ ID NO: 34544 - protein, 10 aa, Artificial Sequence
  Description of Artificial Sequence: Synthetic epitope
PWKANSKQPA

SEQ ID NO: 34545 - protein, 10 aa, Artificial Sequence
  Description of Artificial Sequence: Synthetic epitope
PWKEVPNRQI

SEQ ID NO: 34546 - protein, 10 aa, Artificial Sequence
  Description of Artificial Sequence: Synthetic epitope
PWKRIEVMAL

SEQ ID NO: 34547 - protein, 10 aa, Artificial Sequence
  Description of Artificial Sequence: Synthetic epitope
PWKTPKPIMD

SEQ ID NO: 34548 - protein, 10 aa, Artificial Sequence
  Description of Artificial Sequence: Synthetic epitope
PWLESQIQEG

SEQ ID NO: 34549 - protein, 10 aa, Artificial Sequence
  Description of Artificial Sequence: Synthetic epitope
PWMPTALDQQ

SEQ ID NO: 34550 - protein, 10 aa, Artificial Sequence
  Description of Artificial Sequence: Synthetic epitope
PWMPTALDQQ

SEQ ID NO: 34551 - protein, 10 aa, Artificial Sequence
  Description of Artificial Sequence: Synthetic epitope
PWNSMILIGK

SEQ ID NO: 34552 - protein, 10 aa, Artificial Sequence
  Description of Artificial Sequence: Synthetic epitope
PWPSLILKLL

SEQ ID NO: 34553 - protein, 10 aa, Artificial Sequence
  Description of Artificial Sequence: Synthetic epitope
PWPSSTRSGI

SEQ ID NO: 34554 - protein, 10 aa, Artificial Sequence
  Description of Artificial Sequence: Synthetic epitope
PWPVRKIPLR

SEQ ID NO: 34555 - protein, 10 aa, Artificial Sequence
  Description of Artificial Sequence: Synthetic epitope
PWPVSTKNPG

SEQ ID NO: 34556 - protein, 10 aa, Artificial Sequence
  Description of Artificial Sequence: Synthetic epitope
PWQKMAVESP

SEQ ID NO: 34557 - protein, 10 aa, Artificial Sequence
  Description of Artificial Sequence: Synthetic epitope
PWQRSISHNK

SEQ ID NO: 34558 - protein, 10 aa, Artificial Sequence
  Description of Artificial Sequence: Synthetic epitope
PWRKSRSSLI

SEQ ID NO: 34559 - protein, 10 aa, Artificial Sequence
  Description of Artificial Sequence: Synthetic epitope
PWTAKKVSAP

SEQ ID NO: 34560 - protein, 10 aa, Artificial Sequence
  Description of Artificial Sequence: Synthetic epitope
PWTSSNIDEG

SEQ ID NO: 34561 - protein, 10 aa, Artificial Sequence
  Description of Artificial Sequence: Synthetic epitope
PWTSTTSEVP

SEQ ID NO: 34562 - protein, 10 aa, Artificial Sequence
  Description of Artificial Sequence: Synthetic epitope
PWVITMAAGS

SEQ ID NO: 34563 - protein, 10 aa, Artificial Sequence
  Description of Artificial Sequence: Synthetic epitope
PWWKTQLFMW

SEQ ID NO: 34564 - protein, 10 aa, Artificial Sequence
  Description of Artificial Sequence: Synthetic epitope
PYAASKKTIY

SEQ ID NO: 34565 - protein, 10 aa, Artificial Sequence
  Description of Artificial Sequence: Synthetic epitope
PYDSSASYEK

SEQ ID NO: 34566 - protein, 10 aa, Artificial Sequence
  Description of Artificial Sequence: Synthetic epitope
PYDTQTMESR

SEQ ID NO: 34567 - protein, 10 aa, Artificial Sequence
  Description of Artificial Sequence: Synthetic epitope
PYEDTVTSKP

SEQ ID NO: 34568 - protein, 10 aa, Artificial Sequence
  Description of Artificial Sequence: Synthetic epitope
PYEEAMSVSL

SEQ ID NO: 34569 - protein, 10 aa, Artificial Sequence
  Description of Artificial Sequence: Synthetic epitope
PYFAAEARYP

SEQ ID NO: 34570 - protein, 10 aa, Artificial Sequence
  Description of Artificial Sequence: Synthetic epitope
PYFSAQLGAG

SEQ ID NO: 34571 - protein, 10 aa, Artificial Sequence
  Description of Artificial Sequence: Synthetic epitope
PYGRQTAPSG

SEQ ID NO: 34572 - protein, 10 aa, Artificial Sequence
  Description of Artificial Sequence: Synthetic epitope
PYHDSALARF

SEQ ID NO: 34573 - protein, 10 aa, Artificial Sequence
  Description of Artificial Sequence: Synthetic epitope
PYIGKSRYKR

SEQ ID NO: 34574 - protein, 10 aa, Artificial Sequence
  Description of Artificial Sequence: Synthetic epitope
PYIRTKLNYN

SEQ ID NO: 34575 - protein, 10 aa, Artificial Sequence
  Description of Artificial Sequence: Synthetic epitope
PYISSVTSQS

SEQ ID NO: 34576 - protein, 10 aa, Artificial Sequence
  Description of Artificial Sequence: Synthetic epitope
PYKHQLRRAQ

SEQ ID NO: 34577 - protein, 10 aa, Artificial Sequence
  Description of Artificial Sequence: Synthetic epitope
PYKISESSKV

SEQ ID NO: 34578 - protein, 10 aa, Artificial Sequence
  Description of Artificial Sequence: Synthetic epitope
PYKLLPLQRF

SEQ ID NO: 34579 - protein, 10 aa, Artificial Sequence
  Description of Artificial Sequence: Synthetic epitope
PYKSFRRNPQ

SEQ ID NO: 34580 - protein, 10 aa, Artificial Sequence
  Description of Artificial Sequence: Synthetic epitope
PYKYMTLNPS

SEQ ID NO: 34581 - protein, 10 aa, Artificial Sequence
  Description of Artificial Sequence: Synthetic epitope
PYLEKTAKKG

SEQ ID NO: 34582 - protein, 10 aa, Artificial Sequence
  Description of Artificial Sequence: Synthetic epitope
PYLKKSKVAH

SEQ ID NO: 34583 - protein, 10 aa, Artificial Sequence
  Description of Artificial Sequence: Synthetic epitope
PYLTMDSSGP

SEQ ID NO: 34584 - protein, 10 aa, Artificial Sequence
  Description of Artificial Sequence: Synthetic epitope
PYLVVSLFTD

SEQ ID NO: 34585 - protein, 10 aa, Artificial Sequence
  Description of Artificial Sequence: Synthetic epitope
PYMEGAQLRE

SEQ ID NO: 34586 - protein, 10 aa, Artificial Sequence
  Description of Artificial Sequence: Synthetic epitope
PYMPLYTRIP

SEQ ID NO: 34587 - protein, 10 aa, Artificial Sequence
  Description of Artificial Sequence: Synthetic epitope
PYNSAAGATD

SEQ ID NO: 34588 - protein, 10 aa, Artificial Sequence
  Description of Artificial Sequence: Synthetic epitope
PYNSSTIRSI

SEQ ID NO: 34589 - protein, 10 aa, Artificial Sequence
  Description of Artificial Sequence: Synthetic epitope
PYNVEKEILT

SEQ ID NO: 34590 - protein, 10 aa, Artificial Sequence
  Description of Artificial Sequence: Synthetic epitope
PYPIDIASES

SEQ ID NO: 34591 - protein, 10 aa, Artificial Sequence
  Description of Artificial Sequence: Synthetic epitope
PYPSESAMTK

SEQ ID NO: 34592 - protein, 10 aa, Artificial Sequence
  Description of Artificial Sequence: Synthetic epitope
PYPTQAATKA

SEQ ID NO: 34593 - protein, 10 aa, Artificial Sequence
  Description of Artificial Sequence: Synthetic epitope
PYPTTHIDVD

SEQ ID NO: 34594 - protein, 10 aa, Artificial Sequence
  Description of Artificial Sequence: Synthetic epitope
PYQAASSDSS

SEQ ID NO: 34595 - protein, 10 aa, Artificial Sequence
  Description of Artificial Sequence: Synthetic epitope
PYQAERFRRL

SEQ ID NO: 34596 - protein, 10 aa, Artificial Sequence
  Description of Artificial Sequence: Synthetic epitope
PYQLFSKTKF

SEQ ID NO: 34597 - protein, 10 aa, Artificial Sequence
  Description of Artificial Sequence: Synthetic epitope
PYQLTYRQIK

SEQ ID NO: 34598 - protein, 10 aa, Artificial Sequence
  Description of Artificial Sequence: Synthetic epitope
PYRSMELKTV

SEQ ID NO: 34599 - protein, 10 aa, Artificial Sequence
  Description of Artificial Sequence: Synthetic epitope
PYSLTTQNEK

SEQ ID NO: 34600 - protein, 10 aa, Artificial Sequence
  Description of Artificial Sequence: Synthetic epitope
PYSPVKATRA

SEQ ID NO: 34601 - protein, 10 aa, Artificial Sequence
  Description of Artificial Sequence: Synthetic epitope
PYSSVSASLI

SEQ ID NO: 34602 - protein, 10 aa, Artificial Sequence
  Description of Artificial Sequence: Synthetic epitope
PYTNSSRKQP

SEQ ID NO: 34603 - protein, 10 aa, Artificial Sequence
  Description of Artificial Sequence: Synthetic epitope
PYTSTVSVVA

SEQ ID NO: 34604 - protein, 10 aa, Artificial Sequence
  Description of Artificial Sequence: Synthetic epitope
QAADTDEALR

SEQ ID NO: 34605 - protein, 10 aa, Artificial Sequence
  Description of Artificial Sequence: Synthetic epitope
QAADTQEFRT

SEQ ID NO: 34606 - protein, 10 aa, Artificial Sequence
  Description of Artificial Sequence: Synthetic epitope
QAAEAIDDIP

SEQ ID NO: 34607 - protein, 10 aa, Artificial Sequence
  Description of Artificial Sequence: Synthetic epitope
QAAEEQKTSG

SEQ ID NO: 34608 - protein, 10 aa, Artificial Sequence
  Description of Artificial Sequence: Synthetic epitope
QAAEKFVDEL

SEQ ID NO: 34609 - protein, 10 aa, Artificial Sequence
  Description of Artificial Sequence: Synthetic epitope
QAAEKISADK

SEQ ID NO: 34610 - protein, 10 aa, Artificial Sequence
  Description of Artificial Sequence: Synthetic epitope
QAAEKRSEKE

SEQ ID NO: 34611 - protein, 10 aa, Artificial Sequence
  Description of Artificial Sequence: Synthetic epitope
QAAEQGTDTA

SEQ ID NO: 34612 - protein, 10 aa, Artificial Sequence
  Description of Artificial Sequence: Synthetic epitope
QAAERTQKLD

SEQ ID NO: 34613 - protein, 10 aa, Artificial Sequence
  Description of Artificial Sequence: Synthetic epitope
QAAEVAATVP

SEQ ID NO: 34614 - protein, 10 aa, Artificial Sequence
  Description of Artificial Sequence: Synthetic epitope
QAAEVSQLRG

SEQ ID NO: 34615 - protein, 10 aa, Artificial Sequence
  Description of Artificial Sequence: Synthetic epitope
QAAFESARIY

SEQ ID NO: 34616 - protein, 10 aa, Artificial Sequence
  Description of Artificial Sequence: Synthetic epitope
QAAGFQLNEQ

SEQ ID NO: 34617 - protein, 10 aa, Artificial Sequence
  Description of Artificial Sequence: Synthetic epitope
QAAGKKEDAP

SEQ ID NO: 34618 - protein, 10 aa, Artificial Sequence
  Description of Artificial Sequence: Synthetic epitope
QAAIASQRFE

SEQ ID NO: 34619 - protein, 10 aa, Artificial Sequence
  Description of Artificial Sequence: Synthetic epitope
QAAIDQIEKR

SEQ ID NO: 34620 - protein, 10 aa, Artificial Sequence
  Description of Artificial Sequence: Synthetic epitope
QAAIKQATKD

SEQ ID NO: 34621 - protein, 10 aa, Artificial Sequence
  Description of Artificial Sequence: Synthetic epitope
QAAKAMAPTS

SEQ ID NO: 34622 - protein, 10 aa, Artificial Sequence
  Description of Artificial Sequence: Synthetic epitope
QAAKKEFGPP

SEQ ID NO: 34623 - protein, 10 aa, Artificial Sequence
  Description of Artificial Sequence: Synthetic epitope
QAAKTIDEME

SEQ ID NO: 34624 - protein, 10 aa, Artificial Sequence
  Description of Artificial Sequence: Synthetic epitope
QAALALSLSE

SEQ ID NO: 34625 - protein, 10 aa, Artificial Sequence
  Description of Artificial Sequence: Synthetic epitope
QAALASTQQF

SEQ ID NO: 34626 - protein, 10 aa, Artificial Sequence
  Description of Artificial Sequence: Synthetic epitope
QAALASTQQF

SEQ ID NO: 34627 - protein, 10 aa, Artificial Sequence
  Description of Artificial Sequence: Synthetic epitope
QAALDSAYKE

SEQ ID NO: 34628 - protein, 10 aa, Artificial Sequence
  Description of Artificial Sequence: Synthetic epitope
QAALGARGLR

SEQ ID NO: 34629 - protein, 10 aa, Artificial Sequence
  Description of Artificial Sequence: Synthetic epitope
QAALGPSTSE

SEQ ID NO: 34630 - protein, 10 aa, Artificial Sequence
  Description of Artificial Sequence: Synthetic epitope
QAALIQSQLF

SEQ ID NO: 34631 - protein, 10 aa, Artificial Sequence
  Description of Artificial Sequence: Synthetic epitope
QAALMMEELN

SEQ ID NO: 34632 - protein, 10 aa, Artificial Sequence
  Description of Artificial Sequence: Synthetic epitope
QAALQKAGEV

SEQ ID NO: 34633 - protein, 10 aa, Artificial Sequence
  Description of Artificial Sequence: Synthetic epitope
QAALSSLVAG

SEQ ID NO: 34634 - protein, 10 aa, Artificial Sequence
  Description of Artificial Sequence: Synthetic epitope
QAALVALMSQ

SEQ ID NO: 34635 - protein, 10 aa, Artificial Sequence
  Description of Artificial Sequence: Synthetic epitope
QAAMELELMP

SEQ ID NO: 34636 - protein, 10 aa, Artificial Sequence
  Description of Artificial Sequence: Synthetic epitope
QAANQLKTST

SEQ ID NO: 34637 - protein, 10 aa, Artificial Sequence
  Description of Artificial Sequence: Synthetic epitope
QAAPDEDSTT

SEQ ID NO: 34638 - protein, 10 aa, Artificial Sequence
  Description of Artificial Sequence: Synthetic epitope
QAAPTSVTQF

SEQ ID NO: 34639 - protein, 10 aa, Artificial Sequence
  Description of Artificial Sequence: Synthetic epitope
QAAQLRLSQE

SEQ ID NO: 34640 - protein, 10 aa, Artificial Sequence
  Description of Artificial Sequence: Synthetic epitope
QAAQQIQAAE

SEQ ID NO: 34641 - protein, 10 aa, Artificial Sequence
  Description of Artificial Sequence: Synthetic epitope
QAAQSTEPAA

SEQ ID NO: 34642 - protein, 10 aa, Artificial Sequence
  Description of Artificial Sequence: Synthetic epitope
QAARAALESQ

SEQ ID NO: 34643 - protein, 10 aa, Artificial Sequence
  Description of Artificial Sequence: Synthetic epitope
QAARGSSNAS

SEQ ID NO: 34644 - protein, 10 aa, Artificial Sequence
  Description of Artificial Sequence: Synthetic epitope
QAARISNKGK

SEQ ID NO: 34645 - protein, 10 aa, Artificial Sequence
  Description of Artificial Sequence: Synthetic epitope
QAARLSRTGL

SEQ ID NO: 34646 - protein, 10 aa, Artificial Sequence
  Description of Artificial Sequence: Synthetic epitope
QAARPQNERA

SEQ ID NO: 34647 - protein, 10 aa, Artificial Sequence
  Description of Artificial Sequence: Synthetic epitope
QAARQASRST

SEQ ID NO: 34648 - protein, 10 aa, Artificial Sequence
  Description of Artificial Sequence: Synthetic epitope
QAARQYSPSS

SEQ ID NO: 34649 - protein, 10 aa, Artificial Sequence
  Description of Artificial Sequence: Synthetic epitope
QAARSKAESA

SEQ ID NO: 34650 - protein, 10 aa, Artificial Sequence
  Description of Artificial Sequence: Synthetic epitope
QAASAESSGQ

SEQ ID NO: 34651 - protein, 10 aa, Artificial Sequence
  Description of Artificial Sequence: Synthetic epitope
QAASASQGSA

SEQ ID NO: 34652 - protein, 10 aa, Artificial Sequence
  Description of Artificial Sequence: Synthetic epitope
QAASASQPGE

SEQ ID NO: 34653 - protein, 10 aa, Artificial Sequence
  Description of Artificial Sequence: Synthetic epitope
QAASEVGKEE

SEQ ID NO: 34654 - protein, 10 aa, Artificial Sequence
  Description of Artificial Sequence: Synthetic epitope
QAASNRRAQE

SEQ ID NO: 34655 - protein, 10 aa, Artificial Sequence
  Description of Artificial Sequence: Synthetic epitope
QAASPELTQA

SEQ ID NO: 34656 - protein, 10 aa, Artificial Sequence
  Description of Artificial Sequence: Synthetic epitope
QAASQSQTSS

SEQ ID NO: 34657 - protein, 10 aa, Artificial Sequence
  Description of Artificial Sequence: Synthetic epitope
QAASYGAQSA

SEQ ID NO: 34658 - protein, 10 aa, Artificial Sequence
  Description of Artificial Sequence: Synthetic epitope
QAATELVQAS

SEQ ID NO: 34659 - protein, 10 aa, Artificial Sequence
  Description of Artificial Sequence: Synthetic epitope
QAAVQSLHTL

SEQ ID NO: 34660 - protein, 10 aa, Artificial Sequence
  Description of Artificial Sequence: Synthetic epitope
QAAVSNLVRV

SEQ ID NO: 34661 - protein, 10 aa, Artificial Sequence
  Description of Artificial Sequence: Synthetic epitope
QAAVSVLGTE

SEQ ID NO: 34662 - protein, 10 aa, Artificial Sequence
  Description of Artificial Sequence: Synthetic epitope
QAAVTEISEE

SEQ ID NO: 34663 - protein, 10 aa, Artificial Sequence
  Description of Artificial Sequence: Synthetic epitope
QAAVVEARAQ

SEQ ID NO: 34664 - protein, 10 aa, Artificial Sequence
  Description of Artificial Sequence: Synthetic epitope
QADAASGLPR

SEQ ID NO: 34665 - protein, 10 aa, Artificial Sequence
  Description of Artificial Sequence: Synthetic epitope
QADLALEKAA

SEQ ID NO: 34666 - protein, 10 aa, Artificial Sequence
  Description of Artificial Sequence: Synthetic epitope
QADNERSMGD

SEQ ID NO: 34667 - protein, 10 aa, Artificial Sequence
  Description of Artificial Sequence: Synthetic epitope
QADQASSNAP

SEQ ID NO: 34668 - protein, 10 aa, Artificial Sequence
  Description of Artificial Sequence: Synthetic epitope
QADQDQQASG

SEQ ID NO: 34669 - protein, 10 aa, Artificial Sequence
  Description of Artificial Sequence: Synthetic epitope
QADTAKEKDA

SEQ ID NO: 34670 - protein, 10 aa, Artificial Sequence
  Description of Artificial Sequence: Synthetic epitope
QADTEAKMKG

SEQ ID NO: 34671 - protein, 10 aa, Artificial Sequence
  Description of Artificial Sequence: Synthetic epitope
QADTRESDKM

SEQ ID NO: 34672 - protein, 10 aa, Artificial Sequence
  Description of Artificial Sequence: Synthetic epitope
QADTSTTLSS

SEQ ID NO: 34673 - protein, 10 aa, Artificial Sequence
  Description of Artificial Sequence: Synthetic epitope
QADTTQNLGE

SEQ ID NO: 34674 - protein, 10 aa, Artificial Sequence
  Description of Artificial Sequence: Synthetic epitope
QADVETEMQQ

SEQ ID NO: 34675 - protein, 10 aa, Artificial Sequence
  Description of Artificial Sequence: Synthetic epitope
QADVNEKKAE

SEQ ID NO: 34676 - protein, 10 aa, Artificial Sequence
  Description of Artificial Sequence: Synthetic epitope
QADVRPTLEM

SEQ ID NO: 34677 - protein, 10 aa, Artificial Sequence
  Description of Artificial Sequence: Synthetic epitope
QADYQALQQR

SEQ ID NO: 34678 - protein, 10 aa, Artificial Sequence
  Description of Artificial Sequence: Synthetic epitope
QAEAATLPKP

SEQ ID NO: 34679 - protein, 10 aa, Artificial Sequence
  Description of Artificial Sequence: Synthetic epitope
QAEAGWFSQR

SEQ ID NO: 34680 - protein, 10 aa, Artificial Sequence
  Description of Artificial Sequence: Synthetic epitope
QAEAIPGLAA

SEQ ID NO: 34681 - protein, 10 aa, Artificial Sequence
  Description of Artificial Sequence: Synthetic epitope
QAEAKKENGP

SEQ ID NO: 34682 - protein, 10 aa, Artificial Sequence
  Description of Artificial Sequence: Synthetic epitope
QAEALLAEAM

SEQ ID NO: 34683 - protein, 10 aa, Artificial Sequence
  Description of Artificial Sequence: Synthetic epitope
QAEALVLEGR

SEQ ID NO: 34684 - protein, 10 aa, Artificial Sequence
  Description of Artificial Sequence: Synthetic epitope
QAEASERFAA

SEQ ID NO: 34685 - protein, 10 aa, Artificial Sequence
  Description of Artificial Sequence: Synthetic epitope
QAEATINASV

SEQ ID NO: 34686 - protein, 10 aa, Artificial Sequence
  Description of Artificial Sequence: Synthetic epitope
QAEATSTGEP

SEQ ID NO: 34687 - protein, 10 aa, Artificial Sequence
  Description of Artificial Sequence: Synthetic epitope
QAEAVAEAEL

SEQ ID NO: 34688 - protein, 10 aa, Artificial Sequence
  Description of Artificial Sequence: Synthetic epitope
QAEAVTALEQ

SEQ ID NO: 34689 - protein, 10 aa, Artificial Sequence
  Description of Artificial Sequence: Synthetic epitope
QAEDKKENTE

SEQ ID NO: 34690 - protein, 10 aa, Artificial Sequence
  Description of Artificial Sequence: Synthetic epitope
QAEDMLVSYE

SEQ ID NO: 34691 - protein, 10 aa, Artificial Sequence
  Description of Artificial Sequence: Synthetic epitope
QAEDSNQKAS

SEQ ID NO: 34692 - protein, 10 aa, Artificial Sequence
  Description of Artificial Sequence: Synthetic epitope
QAEEKTTPPL

SEQ ID NO: 34693 - protein, 10 aa, Artificial Sequence
  Description of Artificial Sequence: Synthetic epitope
QAEEQKLISE

SEQ ID NO: 34694 - protein, 10 aa, Artificial Sequence
  Description of Artificial Sequence: Synthetic epitope
QAEETNQQSS

SEQ ID NO: 34695 - protein, 10 aa, Artificial Sequence
  Description of Artificial Sequence: Synthetic epitope
QAEGAKIEED

SEQ ID NO: 34696 - protein, 10 aa, Artificial Sequence
  Description of Artificial Sequence: Synthetic epitope
QAEGAKQTEA

SEQ ID NO: 34697 - protein, 10 aa, Artificial Sequence
  Description of Artificial Sequence: Synthetic epitope
QAEGMEFGFK

SEQ ID NO: 34698 - protein, 10 aa, Artificial Sequence
  Description of Artificial Sequence: Synthetic epitope
QAEIEETLNG

SEQ ID NO: 34699 - protein, 10 aa, Artificial Sequence
  Description of Artificial Sequence: Synthetic epitope
QAEIESIVKP

SEQ ID NO: 34700 - protein, 10 aa, Artificial Sequence
  Description of Artificial Sequence: Synthetic epitope
QAEIKKLSAE

SEQ ID NO: 34701 - protein, 10 aa, Artificial Sequence
  Description of Artificial Sequence: Synthetic epitope
QAEKSRPVMQ

SEQ ID NO: 34702 - protein, 10 aa, Artificial Sequence
  Description of Artificial Sequence: Synthetic epitope
QAELDMLKSG

SEQ ID NO: 34703 - protein, 10 aa, Artificial Sequence
  Description of Artificial Sequence: Synthetic epitope
QAELKMDYES

SEQ ID NO: 34704 - protein, 10 aa, Artificial Sequence
  Description of Artificial Sequence: Synthetic epitope
QAELLKVKQK

SEQ ID NO: 34705 - protein, 10 aa, Artificial Sequence
  Description of Artificial Sequence: Synthetic epitope
QAELRAELAA

SEQ ID NO: 34706 - protein, 10 aa, Artificial Sequence
  Description of Artificial Sequence: Synthetic epitope
QAELTEKESS

SEQ ID NO: 34707 - protein, 10 aa, Artificial Sequence
  Description of Artificial Sequence: Synthetic epitope
QAELVPATVN

SEQ ID NO: 34708 - protein, 10 aa, Artificial Sequence
  Description of Artificial Sequence: Synthetic epitope
QAEMSNKASD

SEQ ID NO: 34709 - protein, 10 aa, Artificial Sequence
  Description of Artificial Sequence: Synthetic epitope
QAEMSSRQAM

SEQ ID NO: 34710 - protein, 10 aa, Artificial Sequence
  Description of Artificial Sequence: Synthetic epitope
QAENTIMLLE

SEQ ID NO: 34711 - protein, 10 aa, Artificial Sequence
  Description of Artificial Sequence: Synthetic epitope
QAEQLNKQQR

SEQ ID NO: 34712 - protein, 10 aa, Artificial Sequence
  Description of Artificial Sequence: Synthetic epitope
QAEQVSSMPM

SEQ ID NO: 34713 - protein, 10 aa, Artificial Sequence
  Description of Artificial Sequence: Synthetic epitope
QAERPNNQQN

SEQ ID NO: 34714 - protein, 10 aa, Artificial Sequence
  Description of Artificial Sequence: Synthetic epitope
QAERQKQAHQ

SEQ ID NO: 34715 - protein, 10 aa, Artificial Sequence
  Description of Artificial Sequence: Synthetic epitope
QAERQKQAHQ

SEQ ID NO: 34716 - protein, 10 aa, Artificial Sequence
  Description of Artificial Sequence: Synthetic epitope
QAERQKQAHQ

SEQ ID NO: 34717 - protein, 10 aa, Artificial Sequence
  Description of Artificial Sequence: Synthetic epitope
QAERQSQEVA

SEQ ID NO: 34718 - protein, 10 aa, Artificial Sequence
  Description of Artificial Sequence: Synthetic epitope
QAESEIKEVP

SEQ ID NO: 34719 - protein, 10 aa, Artificial Sequence
  Description of Artificial Sequence: Synthetic epitope
QAESKAEKEA

SEQ ID NO: 34720 - protein, 10 aa, Artificial Sequence
  Description of Artificial Sequence: Synthetic epitope
QAESVLSATP

SEQ ID NO: 34721 - protein, 10 aa, Artificial Sequence
  Description of Artificial Sequence: Synthetic epitope
QAETASKTRE

SEQ ID NO: 34722 - protein, 10 aa, Artificial Sequence
  Description of Artificial Sequence: Synthetic epitope
QAETASNSAR

SEQ ID NO: 34723 - protein, 10 aa, Artificial Sequence
  Description of Artificial Sequence: Synthetic epitope
QAETEERSPQ

SEQ ID NO: 34724 - protein, 10 aa, Artificial Sequence
  Description of Artificial Sequence: Synthetic epitope
QAEVQEKESD

SEQ ID NO: 34725 - protein, 10 aa, Artificial Sequence
  Description of Artificial Sequence: Synthetic epitope
QAEVQLHSGQ

SEQ ID NO: 34726 - protein, 10 aa, Artificial Sequence
  Description of Artificial Sequence: Synthetic epitope
QAEVQSVPIN

SEQ ID NO: 34727 - protein, 10 aa, Artificial Sequence
  Description of Artificial Sequence: Synthetic epitope
QAEYSELVET

SEQ ID NO: 34728 - protein, 10 aa, Artificial Sequence
  Description of Artificial Sequence: Synthetic epitope
QAFDVSLQQS

SEQ ID NO: 34729 - protein, 10 aa, Artificial Sequence
  Description of Artificial Sequence: Synthetic epitope
QAFEHFAQKG

SEQ ID NO: 34730 - protein, 10 aa, Artificial Sequence
  Description of Artificial Sequence: Synthetic epitope
QAFEKVVTSE

SEQ ID NO: 34731 - protein, 10 aa, Artificial Sequence
  Description of Artificial Sequence: Synthetic epitope
QAFKISVRAL

SEQ ID NO: 34732 - protein, 10 aa, Artificial Sequence
  Description of Artificial Sequence: Synthetic epitope
QAFKTALENF

SEQ ID NO: 34733 - protein, 10 aa, Artificial Sequence
  Description of Artificial Sequence: Synthetic epitope
QAFLAETPRG

SEQ ID NO: 34734 - protein, 10 aa, Artificial Sequence
  Description of Artificial Sequence: Synthetic epitope
QAFLLVAAKV

SEQ ID NO: 34735 - protein, 10 aa, Artificial Sequence
  Description of Artificial Sequence: Synthetic epitope
QAFLSNEKLP

SEQ ID NO: 34736 - protein, 10 aa, Artificial Sequence
  Description of Artificial Sequence: Synthetic epitope
QAFMSQGEHR

SEQ ID NO: 34737 - protein, 10 aa, Artificial Sequence
  Description of Artificial Sequence: Synthetic epitope
QAFRARNWWV

SEQ ID NO: 34738 - protein, 10 aa, Artificial Sequence
  Description of Artificial Sequence: Synthetic epitope
QAFSSLKSLK

SEQ ID NO: 34739 - protein, 10 aa, Artificial Sequence
  Description of Artificial Sequence: Synthetic epitope
QAFTSVDMEV

SEQ ID NO: 34740 - protein, 10 aa, Artificial Sequence
  Description of Artificial Sequence: Synthetic epitope
QAFVKRESQA

SEQ ID NO: 34741 - protein, 10 aa, Artificial Sequence
  Description of Artificial Sequence: Synthetic epitope
QAFVLARYLV

SEQ ID NO: 34742 - protein, 10 aa, Artificial Sequence
  Description of Artificial Sequence: Synthetic epitope
QAGAQGASDM

SEQ ID NO: 34743 - protein, 10 aa, Artificial Sequence
  Description of Artificial Sequence: Synthetic epitope
QAGAQVDARM

SEQ ID NO: 34744 - protein, 10 aa, Artificial Sequence
  Description of Artificial Sequence: Synthetic epitope
QAGEIGEMKD

SEQ ID NO: 34745 - protein, 10 aa, Artificial Sequence
  Description of Artificial Sequence: Synthetic epitope
QAGETEEAET

SEQ ID NO: 34746 - protein, 10 aa, Artificial Sequence
  Description of Artificial Sequence: Synthetic epitope
QAGEVAFRRT

SEQ ID NO: 34747 - protein, 10 aa, Artificial Sequence
  Description of Artificial Sequence: Synthetic epitope
QAGEVSQPSK

SEQ ID NO: 34748 - protein, 10 aa, Artificial Sequence
  Description of Artificial Sequence: Synthetic epitope
QAGKTSQAHQ

SEQ ID NO: 34749 - protein, 10 aa, Artificial Sequence
  Description of Artificial Sequence: Synthetic epitope
QAGMMLKEMQ

SEQ ID NO: 34750 - protein, 10 aa, Artificial Sequence
  Description of Artificial Sequence: Synthetic epitope
QAGPAQTGAR

SEQ ID NO: 34751 - protein, 10 aa, Artificial Sequence
  Description of Artificial Sequence: Synthetic epitope
QAGPSLSSQK

SEQ ID NO: 34752 - protein, 10 aa, Artificial Sequence
  Description of Artificial Sequence: Synthetic epitope
QAGRKEAIDA

SEQ ID NO: 34753 - protein, 10 aa, Artificial Sequence
  Description of Artificial Sequence: Synthetic epitope
QAGSDEKSEA

SEQ ID NO: 34754 - protein, 10 aa, Artificial Sequence
  Description of Artificial Sequence: Synthetic epitope
QAGSLTAKVT

SEQ ID NO: 34755 - protein, 10 aa, Artificial Sequence
  Description of Artificial Sequence: Synthetic epitope
QAGSSVTTDR

SEQ ID NO: 34756 - protein, 10 aa, Artificial Sequence
  Description of Artificial Sequence: Synthetic epitope
QAGSVELEGI

SEQ ID NO: 34757 - protein, 10 aa, Artificial Sequence
  Description of Artificial Sequence: Synthetic epitope
QAGTYIKEFV

SEQ ID NO: 34758 - protein, 10 aa, Artificial Sequence
  Description of Artificial Sequence: Synthetic epitope
QAGVSKLNEA

SEQ ID NO: 34759 - protein, 10 aa, Artificial Sequence
  Description of Artificial Sequence: Synthetic epitope
QAGVSQTTQI

SEQ ID NO: 34760 - protein, 10 aa, Artificial Sequence
  Description of Artificial Sequence: Synthetic epitope
QAGVTSIRAL

SEQ ID NO: 34761 - protein, 10 aa, Artificial Sequence
  Description of Artificial Sequence: Synthetic epitope
QAHEGSEGIF

SEQ ID NO: 34762 - protein, 10 aa, Artificial Sequence
  Description of Artificial Sequence: Synthetic epitope
QAHKPAKSKT

SEQ ID NO: 34763 - protein, 10 aa, Artificial Sequence
  Description of Artificial Sequence: Synthetic epitope
QAHLMSTKMY

SEQ ID NO: 34764 - protein, 10 aa, Artificial Sequence
  Description of Artificial Sequence: Synthetic epitope
QAHQVKKSVK

SEQ ID NO: 34765 - protein, 10 aa, Artificial Sequence
  Description of Artificial Sequence: Synthetic epitope
QAHRLLSASS

SEQ ID NO: 34766 - protein, 10 aa, Artificial Sequence
  Description of Artificial Sequence: Synthetic epitope
QAHSRHSGLS

SEQ ID NO: 34767 - protein, 10 aa, Artificial Sequence
  Description of Artificial Sequence: Synthetic epitope
QAHSSNTVER

SEQ ID NO: 34768 - protein, 10 aa, Artificial Sequence
  Description of Artificial Sequence: Synthetic epitope
QAIAEQVDKA

SEQ ID NO: 34769 - protein, 10 aa, Artificial Sequence
  Description of Artificial Sequence: Synthetic epitope
QAIASTLRED

SEQ ID NO: 34770 - protein, 10 aa, Artificial Sequence
  Description of Artificial Sequence: Synthetic epitope
QAIERAPSYI

SEQ ID NO: 34771 - protein, 10 aa, Artificial Sequence
  Description of Artificial Sequence: Synthetic epitope
QAIGEKEARA

SEQ ID NO: 34772 - protein, 10 aa, Artificial Sequence
  Description of Artificial Sequence: Synthetic epitope
QAIGNTITMV

SEQ ID NO: 34773 - protein, 10 aa, Artificial Sequence
  Description of Artificial Sequence: Synthetic epitope
QAIGSQIEDA

SEQ ID NO: 34774 - protein, 10 aa, Artificial Sequence
  Description of Artificial Sequence: Synthetic epitope
QAIGVEAHQA

SEQ ID NO: 34775 - protein, 10 aa, Artificial Sequence
  Description of Artificial Sequence: Synthetic epitope
QAIHNTVFQV

SEQ ID NO: 34776 - protein, 10 aa, Artificial Sequence
  Description of Artificial Sequence: Synthetic epitope
QAIHSESSDT

SEQ ID NO: 34777 - protein, 10 aa, Artificial Sequence
  Description of Artificial Sequence: Synthetic epitope
QAIIATMGGT

SEQ ID NO: 34778 - protein, 10 aa, Artificial Sequence
  Description of Artificial Sequence: Synthetic epitope
QAIINQGTLA

SEQ ID NO: 34779 - protein, 10 aa, Artificial Sequence
  Description of Artificial Sequence: Synthetic epitope
QAIKADLAAV

SEQ ID NO: 34780 - protein, 10 aa, Artificial Sequence
  Description of Artificial Sequence: Synthetic epitope
QAIKLQVDDT

SEQ ID NO: 34781 - protein, 10 aa, Artificial Sequence
  Description of Artificial Sequence: Synthetic epitope
QAILAVKSTR

SEQ ID NO: 34782 - protein, 10 aa, Artificial Sequence
  Description of Artificial Sequence: Synthetic epitope
QAINSSLSTL

SEQ ID NO: 34783 - protein, 10 aa, Artificial Sequence
  Description of Artificial Sequence: Synthetic epitope
QAIPNVTVPN

SEQ ID NO: 34784 - protein, 10 aa, Artificial Sequence
  Description of Artificial Sequence: Synthetic epitope
QAIPSLSSVT

SEQ ID NO: 34785 - protein, 10 aa, Artificial Sequence
  Description of Artificial Sequence: Synthetic epitope
QAIQASHKKD

SEQ ID NO: 34786 - protein, 10 aa, Artificial Sequence
  Description of Artificial Sequence: Synthetic epitope
QAIQIAQHDA

SEQ ID NO: 34787 - protein, 10 aa, Artificial Sequence
  Description of Artificial Sequence: Synthetic epitope
QAIQLSIEQA

SEQ ID NO: 34788 - protein, 10 aa, Artificial Sequence
  Description of Artificial Sequence: Synthetic epitope
QAIRVTLNIN

SEQ ID NO: 34789 - protein, 10 aa, Artificial Sequence
  Description of Artificial Sequence: Synthetic epitope
QAISSNINSD

SEQ ID NO: 34790 - protein, 10 aa, Artificial Sequence
  Description of Artificial Sequence: Synthetic epitope
QAITKKDQSQ

SEQ ID NO: 34791 - protein, 10 aa, Artificial Sequence
  Description of Artificial Sequence: Synthetic epitope
QAIVNLLKMR

SEQ ID NO: 34792 - protein, 10 aa, Artificial Sequence
  Description of Artificial Sequence: Synthetic epitope
QAIVNQNAET

SEQ ID NO: 34793 - protein, 10 aa, Artificial Sequence
  Description of Artificial Sequence: Synthetic epitope
QAIVSAVANR

SEQ ID NO: 34794 - protein, 10 aa, Artificial Sequence
  Description of Artificial Sequence: Synthetic epitope
QAKAAELQTG

SEQ ID NO: 34795 - protein, 10 aa, Artificial Sequence
  Description of Artificial Sequence: Synthetic epitope
QAKAKTTGAS

SEQ ID NO: 34796 - protein, 10 aa, Artificial Sequence
  Description of Artificial Sequence: Synthetic epitope
QAKEAGHSVS

SEQ ID NO: 34797 - protein, 10 aa, Artificial Sequence
  Description of Artificial Sequence: Synthetic epitope
QAKEESVNKH

SEQ ID NO: 34798 - protein, 10 aa, Artificial Sequence
  Description of Artificial Sequence: Synthetic epitope
QAKEGILNIS

SEQ ID NO: 34799 - protein, 10 aa, Artificial Sequence
  Description of Artificial Sequence: Synthetic epitope
QAKEKVKTTI

SEQ ID NO: 34800 - protein, 10 aa, Artificial Sequence
  Description of Artificial Sequence: Synthetic epitope
QAKELKLEQQ

SEQ ID NO: 34801 - protein, 10 aa, Artificial Sequence
  Description of Artificial Sequence: Synthetic epitope
QAKIAKLGLK

SEQ ID NO: 34802 - protein, 10 aa, Artificial Sequence
  Description of Artificial Sequence: Synthetic epitope
QAKIQGMKNA

SEQ ID NO: 34803 - protein, 10 aa, Artificial Sequence
  Description of Artificial Sequence: Synthetic epitope
QAKKSSKHKA

SEQ ID NO: 34804 - protein, 10 aa, Artificial Sequence
  Description of Artificial Sequence: Synthetic epitope
QAKLNEARKI

SEQ ID NO: 34805 - protein, 10 aa, Artificial Sequence
  Description of Artificial Sequence: Synthetic epitope
QAKLQATTSG

SEQ ID NO: 34806 - protein, 10 aa, Artificial Sequence
  Description of Artificial Sequence: Synthetic epitope
QAKLQLITHA

SEQ ID NO: 34807 - protein, 10 aa, Artificial Sequence
  Description of Artificial Sequence: Synthetic epitope
QAKLTLAKGE

SEQ ID NO: 34808 - protein, 10 aa, Artificial Sequence
  Description of Artificial Sequence: Synthetic epitope
QAKMDQPAKK

SEQ ID NO: 34809 - protein, 10 aa, Artificial Sequence
  Description of Artificial Sequence: Synthetic epitope
QAKQESASSQ

SEQ ID NO: 34810 - protein, 10 aa, Artificial Sequence
  Description of Artificial Sequence: Synthetic epitope
QAKQKKLKRE

SEQ ID NO: 34811 - protein, 10 aa, Artificial Sequence
  Description of Artificial Sequence: Synthetic epitope
QAKQQAEVAH

SEQ ID NO: 34812 - protein, 10 aa, Artificial Sequence
  Description of Artificial Sequence: Synthetic epitope
QAKQQILTHQ

SEQ ID NO: 34813 - protein, 10 aa, Artificial Sequence
  Description of Artificial Sequence: Synthetic epitope
QAKRSQDLEQ

SEQ ID NO: 34814 - protein, 10 aa, Artificial Sequence
  Description of Artificial Sequence: Synthetic epitope
QAKSASRTPG

SEQ ID NO: 34815 - protein, 10 aa, Artificial Sequence
  Description of Artificial Sequence: Synthetic epitope
QAKSQRTKQS

SEQ ID NO: 34816 - protein, 10 aa, Artificial Sequence
  Description of Artificial Sequence: Synthetic epitope
QAKSSLENSS

SEQ ID NO: 34817 - protein, 10 aa, Artificial Sequence
  Description of Artificial Sequence: Synthetic epitope
QAKSSTLINK

SEQ ID NO: 34818 - protein, 10 aa, Artificial Sequence
  Description of Artificial Sequence: Synthetic epitope
QAKTNETEKA

SEQ ID NO: 34819 - protein, 10 aa, Artificial Sequence
  Description of Artificial Sequence: Synthetic epitope
QAKTSPVDEK

SEQ ID NO: 34820 - protein, 10 aa, Artificial Sequence
  Description of Artificial Sequence: Synthetic epitope
QAKTTSLELV

SEQ ID NO: 34821 - protein, 10 aa, Artificial Sequence
  Description of Artificial Sequence: Synthetic epitope
QAKVAKMLEE

SEQ ID NO: 34822 - protein, 10 aa, Artificial Sequence
  Description of Artificial Sequence: Synthetic epitope
QAKVIDTQQK

SEQ ID NO: 34823 - protein, 10 aa, Artificial Sequence
  Description of Artificial Sequence: Synthetic epitope
QAKVKAFGKR

SEQ ID NO: 34824 - protein, 10 aa, Artificial Sequence
  Description of Artificial Sequence: Synthetic epitope
QAKVSALDLA

SEQ ID NO: 34825 - protein, 10 aa, Artificial Sequence
  Description of Artificial Sequence: Synthetic epitope
QAKVTAAKED

SEQ ID NO: 34826 - protein, 10 aa, Artificial Sequence
  Description of Artificial Sequence: Synthetic epitope
QALAFESSAG

SEQ ID NO: 34827 - protein, 10 aa, Artificial Sequence
  Description of Artificial Sequence: Synthetic epitope
QALASAGVVA

SEQ ID NO: 34828 - protein, 10 aa, Artificial Sequence
  Description of Artificial Sequence: Synthetic epitope
QALASISKSG

SEQ ID NO: 34829 - protein, 10 aa, Artificial Sequence
  Description of Artificial Sequence: Synthetic epitope
QALATQTRDR

SEQ ID NO: 34830 - protein, 10 aa, Artificial Sequence
  Description of Artificial Sequence: Synthetic epitope
QALAVQSATT

SEQ ID NO: 34831 - protein, 10 aa, Artificial Sequence
  Description of Artificial Sequence: Synthetic epitope
QALDLVDRQS

SEQ ID NO: 34832 - protein, 10 aa, Artificial Sequence
  Description of Artificial Sequence: Synthetic epitope
QALDRQTATQ

SEQ ID NO: 34833 - protein, 10 aa, Artificial Sequence
  Description of Artificial Sequence: Synthetic epitope
QALEARIRQK

SEQ ID NO: 34834 - protein, 10 aa, Artificial Sequence
  Description of Artificial Sequence: Synthetic epitope
QALEDVSRGG

SEQ ID NO: 34835 - protein, 10 aa, Artificial Sequence
  Description of Artificial Sequence: Synthetic epitope
QALELPQKAE

SEQ ID NO: 34836 - protein, 10 aa, Artificial Sequence
  Description of Artificial Sequence: Synthetic epitope
QALELQRSAQ

SEQ ID NO: 34837 - protein, 10 aa, Artificial Sequence
  Description of Artificial Sequence: Synthetic epitope
QALEQAVRPP

SEQ ID NO: 34838 - protein, 10 aa, Artificial Sequence
  Description of Artificial Sequence: Synthetic epitope
QALEQLGHQA

SEQ ID NO: 34839 - protein, 10 aa, Artificial Sequence
  Description of Artificial Sequence: Synthetic epitope
QALEQSDRQD

SEQ ID NO: 34840 - protein, 10 aa, Artificial Sequence
  Description of Artificial Sequence: Synthetic epitope
QALESNDLVS

SEQ ID NO: 34841 - protein, 10 aa, Artificial Sequence
  Description of Artificial Sequence: Synthetic epitope
QALESSLSPL

SEQ ID NO: 34842 - protein, 10 aa, Artificial Sequence
  Description of Artificial Sequence: Synthetic epitope
QALEVTRERA

SEQ ID NO: 34843 - protein, 10 aa, Artificial Sequence
  Description of Artificial Sequence: Synthetic epitope
QALGEVIEAE

SEQ ID NO: 34844 - protein, 10 aa, Artificial Sequence
  Description of Artificial Sequence: Synthetic epitope
QALGSAISMV

SEQ ID NO: 34845 - protein, 10 aa, Artificial Sequence
  Description of Artificial Sequence: Synthetic epitope
QALHAQMNGR

SEQ ID NO: 34846 - protein, 10 aa, Artificial Sequence
  Description of Artificial Sequence: Synthetic epitope
QALHESEILP

SEQ ID NO: 34847 - protein, 10 aa, Artificial Sequence
  Description of Artificial Sequence: Synthetic epitope
QALILALKTL

SEQ ID NO: 34848 - protein, 10 aa, Artificial Sequence
  Description of Artificial Sequence: Synthetic epitope
QALILIVILE

SEQ ID NO: 34849 - protein, 10 aa, Artificial Sequence
  Description of Artificial Sequence: Synthetic epitope
QALIRVLRPR

SEQ ID NO: 34850 - protein, 10 aa, Artificial Sequence
  Description of Artificial Sequence: Synthetic epitope
QALISTVLTE

SEQ ID NO: 34851 - protein, 10 aa, Artificial Sequence
  Description of Artificial Sequence: Synthetic epitope
QALITLKKNK

SEQ ID NO: 34852 - protein, 10 aa, Artificial Sequence
  Description of Artificial Sequence: Synthetic epitope
QALKGSQDSS

SEQ ID NO: 34853 - protein, 10 aa, Artificial Sequence
  Description of Artificial Sequence: Synthetic epitope
QALKTQDVEY

SEQ ID NO: 34854 - protein, 10 aa, Artificial Sequence
  Description of Artificial Sequence: Synthetic epitope
QALKVIFYLD

SEQ ID NO: 34855 - protein, 10 aa, Artificial Sequence
  Description of Artificial Sequence: Synthetic epitope
QALKVKLEMK

SEQ ID NO: 34856 - protein, 10 aa, Artificial Sequence
  Description of Artificial Sequence: Synthetic epitope
QALKVNEEQM

SEQ ID NO: 34857 - protein, 10 aa, Artificial Sequence
  Description of Artificial Sequence: Synthetic epitope
QALLALQEAA

SEQ ID NO: 34858 - protein, 10 aa, Artificial Sequence
  Description of Artificial Sequence: Synthetic epitope
QALLARPSST

SEQ ID NO: 34859 - protein, 10 aa, Artificial Sequence
  Description of Artificial Sequence: Synthetic epitope
QALLDQNSQT

SEQ ID NO: 34860 - protein, 10 aa, Artificial Sequence
  Description of Artificial Sequence: Synthetic epitope
QALLEKEDES

SEQ ID NO: 34861 - protein, 10 aa, Artificial Sequence
  Description of Artificial Sequence: Synthetic epitope
QALLEVVASD

SEQ ID NO: 34862 - protein, 10 aa, Artificial Sequence
  Description of Artificial Sequence: Synthetic epitope
QALLREQQKR

SEQ ID NO: 34863 - protein, 10 aa, Artificial Sequence
  Description of Artificial Sequence: Synthetic epitope
QALLSQFLDM

SEQ ID NO: 34864 - protein, 10 aa, Artificial Sequence
  Description of Artificial Sequence: Synthetic epitope
QALLYSVEVL

SEQ ID NO: 34865 - protein, 10 aa, Artificial Sequence
  Description of Artificial Sequence: Synthetic epitope
QALMLQQLQE

SEQ ID NO: 34866 - protein, 10 aa, Artificial Sequence
  Description of Artificial Sequence: Synthetic epitope
QALNTEEAAE

SEQ ID NO: 34867 - protein, 10 aa, Artificial Sequence
  Description of Artificial Sequence: Synthetic epitope
QALQAKASLT

SEQ ID NO: 34868 - protein, 10 aa, Artificial Sequence
  Description of Artificial Sequence: Synthetic epitope
QALQASQAER

SEQ ID NO: 34869 - protein, 10 aa, Artificial Sequence
  Description of Artificial Sequence: Synthetic epitope
QALQATVARK

SEQ ID NO: 34870 - protein, 10 aa, Artificial Sequence
  Description of Artificial Sequence: Synthetic epitope
QALQAVSEQE

SEQ ID NO: 34871 - protein, 10 aa, Artificial Sequence
  Description of Artificial Sequence: Synthetic epitope
QALQEESQAQ

SEQ ID NO: 34872 - protein, 10 aa, Artificial Sequence
  Description of Artificial Sequence: Synthetic epitope
QALQEKRINE

SEQ ID NO: 34873 - protein, 10 aa, Artificial Sequence
  Description of Artificial Sequence: Synthetic epitope
QALQNAVDAV

SEQ ID NO: 34874 - protein, 10 aa, Artificial Sequence
  Description of Artificial Sequence: Synthetic epitope
QALQQAVVDD

SEQ ID NO: 34875 - protein, 10 aa, Artificial Sequence
  Description of Artificial Sequence: Synthetic epitope
QALQQMLKHP

SEQ ID NO: 34876 - protein, 10 aa, Artificial Sequence
  Description of Artificial Sequence: Synthetic epitope
QALQQSTTAK

SEQ ID NO: 34877 - protein, 10 aa, Artificial Sequence
  Description of Artificial Sequence: Synthetic epitope
QALQSQADLG

SEQ ID NO: 34878 - protein, 10 aa, Artificial Sequence
  Description of Artificial Sequence: Synthetic epitope
QALQSQNSST

SEQ ID NO: 34879 - protein, 10 aa, Artificial Sequence
  Description of Artificial Sequence: Synthetic epitope
QALQTKVTQQ

SEQ ID NO: 34880 - protein, 10 aa, Artificial Sequence
  Description of Artificial Sequence: Synthetic epitope
QALRASLEMK

SEQ ID NO: 34881 - protein, 10 aa, Artificial Sequence
  Description of Artificial Sequence: Synthetic epitope
QALRLEAPEL

SEQ ID NO: 34882 - protein, 10 aa, Artificial Sequence
  Description of Artificial Sequence: Synthetic epitope
QALRQIGSVI

SEQ ID NO: 34883 - protein, 10 aa, Artificial Sequence
  Description of Artificial Sequence: Synthetic epitope
QALRRNAERT

SEQ ID NO: 34884 - protein, 10 aa, Artificial Sequence
  Description of Artificial Sequence: Synthetic epitope
QALRTQAFQV

SEQ ID NO: 34885 - protein, 10 aa, Artificial Sequence
  Description of Artificial Sequence: Synthetic epitope
QALRVSQALI

SEQ ID NO: 34886 - protein, 10 aa, Artificial Sequence
  Description of Artificial Sequence: Synthetic epitope
QALSAAVEKK

SEQ ID NO: 34887 - protein, 10 aa, Artificial Sequence
  Description of Artificial Sequence: Synthetic epitope
QALSSELAQA

SEQ ID NO: 34888 - protein, 10 aa, Artificial Sequence
  Description of Artificial Sequence: Synthetic epitope
QALSTKNKEF

SEQ ID NO: 34889 - protein, 10 aa, Artificial Sequence
  Description of Artificial Sequence: Synthetic epitope
QALSVADTSV

SEQ ID NO: 34890 - protein, 10 aa, Artificial Sequence
  Description of Artificial Sequence: Synthetic epitope
QALTAQLTAA

SEQ ID NO: 34891 - protein, 10 aa, Artificial Sequence
  Description of Artificial Sequence: Synthetic epitope
QALTEAMYTN

SEQ ID NO: 34892 - protein, 10 aa, Artificial Sequence
  Description of Artificial Sequence: Synthetic epitope
QALTKETVAQ

SEQ ID NO: 34893 - protein, 10 aa, Artificial Sequence
  Description of Artificial Sequence: Synthetic epitope
QALTKQRLEE

SEQ ID NO: 34894 - protein, 10 aa, Artificial Sequence
  Description of Artificial Sequence: Synthetic epitope
QALTPATALD

SEQ ID NO: 34895 - protein, 10 aa, Artificial Sequence
  Description of Artificial Sequence: Synthetic epitope
QALVVTGTNN

SEQ ID NO: 34896 - protein, 10 aa, Artificial Sequence
  Description of Artificial Sequence: Synthetic epitope
QAMAKDQAVE

SEQ ID NO: 34897 - protein, 10 aa, Artificial Sequence
  Description of Artificial Sequence: Synthetic epitope
QAMASTEEKA

SEQ ID NO: 34898 - protein, 10 aa, Artificial Sequence
  Description of Artificial Sequence: Synthetic epitope
QAMDKKAQGP

SEQ ID NO: 34899 - protein, 10 aa, Artificial Sequence
  Description of Artificial Sequence: Synthetic epitope
QAMGQVRSQE

SEQ ID NO: 34900 - protein, 10 aa, Artificial Sequence
  Description of Artificial Sequence: Synthetic epitope
QAMKDALDSG

SEQ ID NO: 34901 - protein, 10 aa, Artificial Sequence
  Description of Artificial Sequence: Synthetic epitope
QAMLLKAMAA

SEQ ID NO: 34902 - protein, 10 aa, Artificial Sequence
  Description of Artificial Sequence: Synthetic epitope
QAMQEKDEAK

SEQ ID NO: 34903 - protein, 10 aa, Artificial Sequence
  Description of Artificial Sequence: Synthetic epitope
QAMQKRRLHR

SEQ ID NO: 34904 - protein, 10 aa, Artificial Sequence
  Description of Artificial Sequence: Synthetic epitope
QAMQKRRLHR

SEQ ID NO: 34905 - protein, 10 aa, Artificial Sequence
  Description of Artificial Sequence: Synthetic epitope
QAMRHIVTGT

SEQ ID NO: 34906 - protein, 10 aa, Artificial Sequence
  Description of Artificial Sequence: Synthetic epitope
QAMRTESNLG

SEQ ID NO: 34907 - protein, 10 aa, Artificial Sequence
  Description of Artificial Sequence: Synthetic epitope
QAMTEKQTLL

SEQ ID NO: 34908 - protein, 10 aa, Artificial Sequence
  Description of Artificial Sequence: Synthetic epitope
QAMTKAMWEA

SEQ ID NO: 34909 - protein, 10 aa, Artificial Sequence
  Description of Artificial Sequence: Synthetic epitope
QANDVTGVQL

SEQ ID NO: 34910 - protein, 10 aa, Artificial Sequence
  Description of Artificial Sequence: Synthetic epitope
QANFKVKRRW

SEQ ID NO: 34911 - protein, 10 aa, Artificial Sequence
  Description of Artificial Sequence: Synthetic epitope
QANGVVGNEA

SEQ ID NO: 34912 - protein, 10 aa, Artificial Sequence
  Description of Artificial Sequence: Synthetic epitope
QANKDHNEKH

SEQ ID NO: 34913 - protein, 10 aa, Artificial Sequence
  Description of Artificial Sequence: Synthetic epitope
QANKLHNQGE

SEQ ID NO: 34914 - protein, 10 aa, Artificial Sequence
  Description of Artificial Sequence: Synthetic epitope
QANKTFVSGS

SEQ ID NO: 34915 - protein, 10 aa, Artificial Sequence
  Description of Artificial Sequence: Synthetic epitope
QANLNMANSI

SEQ ID NO: 34916 - protein, 10 aa, Artificial Sequence
  Description of Artificial Sequence: Synthetic epitope
QANLSKAEKH

SEQ ID NO: 34917 - protein, 10 aa, Artificial Sequence
  Description of Artificial Sequence: Synthetic epitope
QANLSLDDKL

SEQ ID NO: 34918 - protein, 10 aa, Artificial Sequence
  Description of Artificial Sequence: Synthetic epitope
QANLTASSEG

SEQ ID NO: 34919 - protein, 10 aa, Artificial Sequence
  Description of Artificial Sequence: Synthetic epitope
QANNAKAMSA

SEQ ID NO: 34920 - protein, 10 aa, Artificial Sequence
  Description of Artificial Sequence: Synthetic epitope
QANNSHITPQ

SEQ ID NO: 34921 - protein, 10 aa, Artificial Sequence
  Description of Artificial Sequence: Synthetic epitope
QANNVSLSNM

SEQ ID NO: 34922 - protein, 10 aa, Artificial Sequence
  Description of Artificial Sequence: Synthetic epitope
QANQVYADSW

SEQ ID NO: 34923 - protein, 10 aa, Artificial Sequence
  Description of Artificial Sequence: Synthetic epitope
QANSPGQKQQ

SEQ ID NO: 34924 - protein, 10 aa, Artificial Sequence
  Description of Artificial Sequence: Synthetic epitope
QANSQPPVQV

SEQ ID NO: 34925 - protein, 10 aa, Artificial Sequence
  Description of Artificial Sequence: Synthetic epitope
QANSVSVSAS

SEQ ID NO: 34926 - protein, 10 aa, Artificial Sequence
  Description of Artificial Sequence: Synthetic epitope
QANTKKLLGT

SEQ ID NO: 34927 - protein, 10 aa, Artificial Sequence
  Description of Artificial Sequence: Synthetic epitope
QANTSALILE

SEQ ID NO: 34928 - protein, 10 aa, Artificial Sequence
  Description of Artificial Sequence: Synthetic epitope
QANVEKSLTL

SEQ ID NO: 34929 - protein, 10 aa, Artificial Sequence
  Description of Artificial Sequence: Synthetic epitope
QAPAKAQSAL

SEQ ID NO: 34930 - protein, 10 aa, Artificial Sequence
  Description of Artificial Sequence: Synthetic epitope
QAPAQAQTSD

SEQ ID NO: 34931 - protein, 10 aa, Artificial Sequence
  Description of Artificial Sequence: Synthetic epitope
QAPASSEEAN

SEQ ID NO: 34932 - protein, 10 aa, Artificial Sequence
  Description of Artificial Sequence: Synthetic epitope
QAPELANVAG

SEQ ID NO: 34933 - protein, 10 aa, Artificial Sequence
  Description of Artificial Sequence: Synthetic epitope
QAPELAVKEM

SEQ ID NO: 34934 - protein, 10 aa, Artificial Sequence
  Description of Artificial Sequence: Synthetic epitope
QAPESVLAEH

SEQ ID NO: 34935 - protein, 10 aa, Artificial Sequence
  Description of Artificial Sequence: Synthetic epitope
QAPKTKKFAS

SEQ ID NO: 34936 - protein, 10 aa, Artificial Sequence
  Description of Artificial Sequence: Synthetic epitope
QAPLQTQALQ

SEQ ID NO: 34937 - protein, 10 aa, Artificial Sequence
  Description of Artificial Sequence: Synthetic epitope
QAPPQSAAKP

SEQ ID NO: 34938 - protein, 10 aa, Artificial Sequence
  Description of Artificial Sequence: Synthetic epitope
QAPRRARKRA

SEQ ID NO: 34939 - protein, 10 aa, Artificial Sequence
  Description of Artificial Sequence: Synthetic epitope
QAPSLLSSGA

SEQ ID NO: 34940 - protein, 10 aa, Artificial Sequence
  Description of Artificial Sequence: Synthetic epitope
QAPSSVMSLH

SEQ ID NO: 34941 - protein, 10 aa, Artificial Sequence
  Description of Artificial Sequence: Synthetic epitope
QAPVEKVADK

SEQ ID NO: 34942 - protein, 10 aa, Artificial Sequence
  Description of Artificial Sequence: Synthetic epitope
QAPVKLSLNL

SEQ ID NO: 34943 - protein, 10 aa, Artificial Sequence
  Description of Artificial Sequence: Synthetic epitope
QAPVSQAQMS

SEQ ID NO: 34944 - protein, 10 aa, Artificial Sequence
  Description of Artificial Sequence: Synthetic epitope
QAPVSVISEG

SEQ ID NO: 34945 - protein, 10 aa, Artificial Sequence
  Description of Artificial Sequence: Synthetic epitope
QAQAEQPAQS

SEQ ID NO: 34946 - protein, 10 aa, Artificial Sequence
  Description of Artificial Sequence: Synthetic epitope
QAQALPGQML

SEQ ID NO: 34947 - protein, 10 aa, Artificial Sequence
  Description of Artificial Sequence: Synthetic epitope
QAQAQAQLLA

SEQ ID NO: 34948 - protein, 10 aa, Artificial Sequence
  Description of Artificial Sequence: Synthetic epitope
QAQAQPFGSK

SEQ ID NO: 34949 - protein, 10 aa, Artificial Sequence
  Description of Artificial Sequence: Synthetic epitope
QAQAVTAAST

SEQ ID NO: 34950 - protein, 10 aa, Artificial Sequence
  Description of Artificial Sequence: Synthetic epitope
QAQDDSQIQN

SEQ ID NO: 34951 - protein, 10 aa, Artificial Sequence
  Description of Artificial Sequence: Synthetic epitope
QAQDTSGSPS

SEQ ID NO: 34952 - protein, 10 aa, Artificial Sequence
  Description of Artificial Sequence: Synthetic epitope
QAQEAKGEKK

SEQ ID NO: 34953 - protein, 10 aa, Artificial Sequence
  Description of Artificial Sequence: Synthetic epitope
QAQEDEISEN

SEQ ID NO: 34954 - protein, 10 aa, Artificial Sequence
  Description of Artificial Sequence: Synthetic epitope
QAQEEAKGAL

SEQ ID NO: 34955 - protein, 10 aa, Artificial Sequence
  Description of Artificial Sequence: Synthetic epitope
QAQEIARQAA

SEQ ID NO: 34956 - protein, 10 aa, Artificial Sequence
  Description of Artificial Sequence: Synthetic epitope
QAQENAHGLS

SEQ ID NO: 34957 - protein, 10 aa, Artificial Sequence
  Description of Artificial Sequence: Synthetic epitope
QAQFRMAQEE

SEQ ID NO: 34958 - protein, 10 aa, Artificial Sequence
  Description of Artificial Sequence: Synthetic epitope
QAQFTQERQR

SEQ ID NO: 34959 - protein, 10 aa, Artificial Sequence
  Description of Artificial Sequence: Synthetic epitope
QAQGPISQVS

SEQ ID NO: 34960 - protein, 10 aa, Artificial Sequence
  Description of Artificial Sequence: Synthetic epitope
QAQIRSLKNS

SEQ ID NO: 34961 - protein, 10 aa, Artificial Sequence
  Description of Artificial Sequence: Synthetic epitope
QAQKALKQLQ

SEQ ID NO: 34962 - protein, 10 aa, Artificial Sequence
  Description of Artificial Sequence: Synthetic epitope
QAQKMPVAKT

SEQ ID NO: 34963 - protein, 10 aa, Artificial Sequence
  Description of Artificial Sequence: Synthetic epitope
QAQKSKAVEE

SEQ ID NO: 34964 - protein, 10 aa, Artificial Sequence
  Description of Artificial Sequence: Synthetic epitope
QAQKSLLGEV

SEQ ID NO: 34965 - protein, 10 aa, Artificial Sequence
  Description of Artificial Sequence: Synthetic epitope
QAQKVQVSSQ

SEQ ID NO: 34966 - protein, 10 aa, Artificial Sequence
  Description of Artificial Sequence: Synthetic epitope
QAQLEKAKTK

SEQ ID NO: 34967 - protein, 10 aa, Artificial Sequence
  Description of Artificial Sequence: Synthetic epitope
QAQLNMPLSE

SEQ ID NO: 34968 - protein, 10 aa, Artificial Sequence
  Description of Artificial Sequence: Synthetic epitope
QAQLQAQKEE

SEQ ID NO: 34969 - protein, 10 aa, Artificial Sequence
  Description of Artificial Sequence: Synthetic epitope
QAQLQQEMRK

SEQ ID NO: 34970 - protein, 10 aa, Artificial Sequence
  Description of Artificial Sequence: Synthetic epitope
QAQLSQTQAE

SEQ ID NO: 34971 - protein, 10 aa, Artificial Sequence
  Description of Artificial Sequence: Synthetic epitope
QAQNEKSFFK

SEQ ID NO: 34972 - protein, 10 aa, Artificial Sequence
  Description of Artificial Sequence: Synthetic epitope
QAQNNTYRTG

SEQ ID NO: 34973 - protein, 10 aa, Artificial Sequence
  Description of Artificial Sequence: Synthetic epitope
QAQPASLVEV

SEQ ID NO: 34974 - protein, 10 aa, Artificial Sequence
  Description of Artificial Sequence: Synthetic epitope
QAQQKKAPAK

SEQ ID NO: 34975 - protein, 10 aa, Artificial Sequence
  Description of Artificial Sequence: Synthetic epitope
QAQQSQNDNK

SEQ ID NO: 34976 - protein, 10 aa, Artificial Sequence
  Description of Artificial Sequence: Synthetic epitope
QAQQVQRIIS

SEQ ID NO: 34977 - protein, 10 aa, Artificial Sequence
  Description of Artificial Sequence: Synthetic epitope
QAQRASVEAQ

SEQ ID NO: 34978 - protein, 10 aa, Artificial Sequence
  Description of Artificial Sequence: Synthetic epitope
QAQRMLAPKR

SEQ ID NO: 34979 - protein, 10 aa, Artificial Sequence
  Description of Artificial Sequence: Synthetic epitope
QAQRSTDKEA

SEQ ID NO: 34980 - protein, 10 aa, Artificial Sequence
  Description of Artificial Sequence: Synthetic epitope
QAQSKEKTLQ

SEQ ID NO: 34981 - protein, 10 aa, Artificial Sequence
  Description of Artificial Sequence: Synthetic epitope
QAQSKKTKSI

SEQ ID NO: 34982 - protein, 10 aa, Artificial Sequence
  Description of Artificial Sequence: Synthetic epitope
QAQSSASVPP

SEQ ID NO: 34983 - protein, 10 aa, Artificial Sequence
  Description of Artificial Sequence: Synthetic epitope
QAQSSVSLQQ

SEQ ID NO: 34984 - protein, 10 aa, Artificial Sequence
  Description of Artificial Sequence: Synthetic epitope
QAQSSVSLQQ

SEQ ID NO: 34985 - protein, 10 aa, Artificial Sequence
  Description of Artificial Sequence: Synthetic epitope
QAQTLAQAQA

SEQ ID NO: 34986 - protein, 10 aa, Artificial Sequence
  Description of Artificial Sequence: Synthetic epitope
QAQTTVQPSA

SEQ ID NO: 34987 - protein, 10 aa, Artificial Sequence
  Description of Artificial Sequence: Synthetic epitope
QAQTVAEQVE

SEQ ID NO: 34988 - protein, 10 aa, Artificial Sequence
  Description of Artificial Sequence: Synthetic epitope
QAQVKAKASK

SEQ ID NO: 34989 - protein, 10 aa, Artificial Sequence
  Description of Artificial Sequence: Synthetic epitope
QAQVTLSNAQ

SEQ ID NO: 34990 - protein, 10 aa, Artificial Sequence
  Description of Artificial Sequence: Synthetic epitope
QAQWTVLKST

SEQ ID NO: 34991 - protein, 10 aa, Artificial Sequence
  Description of Artificial Sequence: Synthetic epitope
QARALIKIDV

SEQ ID NO: 34992 - protein, 10 aa, Artificial Sequence
  Description of Artificial Sequence: Synthetic epitope
QARANLTQAS

SEQ ID NO: 34993 - protein, 10 aa, Artificial Sequence
  Description of Artificial Sequence: Synthetic epitope
QARAPSQYST

SEQ ID NO: 34994 - protein, 10 aa, Artificial Sequence
  Description of Artificial Sequence: Synthetic epitope
QARAQSNQAQ

SEQ ID NO: 34995 - protein, 10 aa, Artificial Sequence
  Description of Artificial Sequence: Synthetic epitope
QAREAKSHQK

SEQ ID NO: 34996 - protein, 10 aa, Artificial Sequence
  Description of Artificial Sequence: Synthetic epitope
QAREEQVEGT

SEQ ID NO: 34997 - protein, 10 aa, Artificial Sequence
  Description of Artificial Sequence: Synthetic epitope
QARERQALAR

SEQ ID NO: 34998 - protein, 10 aa, Artificial Sequence
  Description of Artificial Sequence: Synthetic epitope
QARESNSDRV

SEQ ID NO: 34999 - protein, 10 aa, Artificial Sequence
  Description of Artificial Sequence: Synthetic epitope
QARESQKVSH

SEQ ID NO: 35000 - protein, 10 aa, Artificial Sequence
  Description of Artificial Sequence: Synthetic epitope
QARFNESSQK

SEQ ID NO: 35001 - protein, 10 aa, Artificial Sequence
  Description of Artificial Sequence: Synthetic epitope
QARGLSSQNL

SEQ ID NO: 35002 - protein, 10 aa, Artificial Sequence
  Description of Artificial Sequence: Synthetic epitope
QARKMYIHIL

SEQ ID NO: 35003 - protein, 10 aa, Artificial Sequence
  Description of Artificial Sequence: Synthetic epitope
QARKWKFEMS

SEQ ID NO: 35004 - protein, 10 aa, Artificial Sequence
  Description of Artificial Sequence: Synthetic epitope
QARLQAQEEQ

SEQ ID NO: 35005 - protein, 10 aa, Artificial Sequence
  Description of Artificial Sequence: Synthetic epitope
QARMLVMEDQ

SEQ ID NO: 35006 - protein, 10 aa, Artificial Sequence
  Description of Artificial Sequence: Synthetic epitope
QARMSIMDRI

SEQ ID NO: 35007 - protein, 10 aa, Artificial Sequence
  Description of Artificial Sequence: Synthetic epitope
QARQSQLAQD

SEQ ID NO: 35008 - protein, 10 aa, Artificial Sequence
  Description of Artificial Sequence: Synthetic epitope
QARRAAIQEL

SEQ ID NO: 35009 - protein, 10 aa, Artificial Sequence
  Description of Artificial Sequence: Synthetic epitope
QARRTRGTKA

SEQ ID NO: 35010 - protein, 10 aa, Artificial Sequence
  Description of Artificial Sequence: Synthetic epitope
QARSDYHVTQ

SEQ ID NO: 35011 - protein, 10 aa, Artificial Sequence
  Description of Artificial Sequence: Synthetic epitope
QARSSTVGNQ

SEQ ID NO: 35012 - protein, 10 aa, Artificial Sequence
  Description of Artificial Sequence: Synthetic epitope
QARVETISTD

SEQ ID NO: 35013 - protein, 10 aa, Artificial Sequence
  Description of Artificial Sequence: Synthetic epitope
QARWQMSARK

SEQ ID NO: 35014 - protein, 10 aa, Artificial Sequence
  Description of Artificial Sequence: Synthetic epitope
QARYESQRIQ

SEQ ID NO: 35015 - protein, 10 aa, Artificial Sequence
  Description of Artificial Sequence: Synthetic epitope
QASAAPTSVD

SEQ ID NO: 35016 - protein, 10 aa, Artificial Sequence
  Description of Artificial Sequence: Synthetic epitope
QASAASATLS

SEQ ID NO: 35017 - protein, 10 aa, Artificial Sequence
  Description of Artificial Sequence: Synthetic epitope
QASAGAKELT

SEQ ID NO: 35018 - protein, 10 aa, Artificial Sequence
  Description of Artificial Sequence: Synthetic epitope
QASASERLPS

SEQ ID NO: 35019 - protein, 10 aa, Artificial Sequence
  Description of Artificial Sequence: Synthetic epitope
QASASVQEQM

SEQ ID NO: 35020 - protein, 10 aa, Artificial Sequence
  Description of Artificial Sequence: Synthetic epitope
QASATLDTLV

SEQ ID NO: 35021 - protein, 10 aa, Artificial Sequence
  Description of Artificial Sequence: Synthetic epitope
QASATPFTDI

SEQ ID NO: 35022 - protein, 10 aa, Artificial Sequence
  Description of Artificial Sequence: Synthetic epitope
QASDIKSFSA

SEQ ID NO: 35023 - protein, 10 aa, Artificial Sequence
  Description of Artificial Sequence: Synthetic epitope
QASEEINQVE

SEQ ID NO: 35024 - protein, 10 aa, Artificial Sequence
  Description of Artificial Sequence: Synthetic epitope
QASEGGLANV

SEQ ID NO: 35025 - protein, 10 aa, Artificial Sequence
  Description of Artificial Sequence: Synthetic epitope
QASEKVSNKG

SEQ ID NO: 35026 - protein, 10 aa, Artificial Sequence
  Description of Artificial Sequence: Synthetic epitope
QASESSAEDS

SEQ ID NO: 35027 - protein, 10 aa, Artificial Sequence
  Description of Artificial Sequence: Synthetic epitope
QASETLAVRG

SEQ ID NO: 35028 - protein, 10 aa, Artificial Sequence
  Description of Artificial Sequence: Synthetic epitope
QASFESFEEM

SEQ ID NO: 35029 - protein, 10 aa, Artificial Sequence
  Description of Artificial Sequence: Synthetic epitope
QASFYSKLLQ

SEQ ID NO: 35030 - protein, 10 aa, Artificial Sequence
  Description of Artificial Sequence: Synthetic epitope
QASGEAALEA

SEQ ID NO: 35031 - protein, 10 aa, Artificial Sequence
  Description of Artificial Sequence: Synthetic epitope
QASGNVKKAL

SEQ ID NO: 35032 - protein, 10 aa, Artificial Sequence
  Description of Artificial Sequence: Synthetic epitope
QASGQSYSSR

SEQ ID NO: 35033 - protein, 10 aa, Artificial Sequence
  Description of Artificial Sequence: Synthetic epitope
QASGSVTEIS

SEQ ID NO: 35034 - protein, 10 aa, Artificial Sequence
  Description of Artificial Sequence: Synthetic epitope
QASITERRKK

SEQ ID NO: 35035 - protein, 10 aa, Artificial Sequence
  Description of Artificial Sequence: Synthetic epitope
QASIYRDEND

SEQ ID NO: 35036 - protein, 10 aa, Artificial Sequence
  Description of Artificial Sequence: Synthetic epitope
QASKETDMEL

SEQ ID NO: 35037 - protein, 10 aa, Artificial Sequence
  Description of Artificial Sequence: Synthetic epitope
QASKKEESVV

SEQ ID NO: 35038 - protein, 10 aa, Artificial Sequence
  Description of Artificial Sequence: Synthetic epitope
QASKKTAMAA

SEQ ID NO: 35039 - protein, 10 aa, Artificial Sequence
  Description of Artificial Sequence: Synthetic epitope
QASLDSITHR

SEQ ID NO: 35040 - protein, 10 aa, Artificial Sequence
  Description of Artificial Sequence: Synthetic epitope
QASLEAEQEA

SEQ ID NO: 35041 - protein, 10 aa, Artificial Sequence
  Description of Artificial Sequence: Synthetic epitope
QASLKEEKWY

SEQ ID NO: 35042 - protein, 10 aa, Artificial Sequence
  Description of Artificial Sequence: Synthetic epitope
QASLKKLAAR

SEQ ID NO: 35043 - protein, 10 aa, Artificial Sequence
  Description of Artificial Sequence: Synthetic epitope
QASLKSVENG

SEQ ID NO: 35044 - protein, 10 aa, Artificial Sequence
  Description of Artificial Sequence: Synthetic epitope
QASLNEAAEK

SEQ ID NO: 35045 - protein, 10 aa, Artificial Sequence
  Description of Artificial Sequence: Synthetic epitope
QASLQASQAG

SEQ ID NO: 35046 - protein, 10 aa, Artificial Sequence
  Description of Artificial Sequence: Synthetic epitope
QASLSAQVNT

SEQ ID NO: 35047 - protein, 10 aa, Artificial Sequence
  Description of Artificial Sequence: Synthetic epitope
QASLTATHSS

SEQ ID NO: 35048 - protein, 10 aa, Artificial Sequence
  Description of Artificial Sequence: Synthetic epitope
QASMEKASME

SEQ ID NO: 35049 - protein, 10 aa, Artificial Sequence
  Description of Artificial Sequence: Synthetic epitope
QASNLISTAG

SEQ ID NO: 35050 - protein, 10 aa, Artificial Sequence
  Description of Artificial Sequence: Synthetic epitope
QASPVAFKKI

SEQ ID NO: 35051 - protein, 10 aa, Artificial Sequence
  Description of Artificial Sequence: Synthetic epitope
QASQAEADQQ

SEQ ID NO: 35052 - protein, 10 aa, Artificial Sequence
  Description of Artificial Sequence: Synthetic epitope
QASQAVSKQQ

SEQ ID NO: 35053 - protein, 10 aa, Artificial Sequence
  Description of Artificial Sequence: Synthetic epitope
QASQLSSLPQ

SEQ ID NO: 35054 - protein, 10 aa, Artificial Sequence
  Description of Artificial Sequence: Synthetic epitope
QASQMYDSSL

SEQ ID NO: 35055 - protein, 10 aa, Artificial Sequence
  Description of Artificial Sequence: Synthetic epitope
QASQSVILHS

SEQ ID NO: 35056 - protein, 10 aa, Artificial Sequence
  Description of Artificial Sequence: Synthetic epitope
QASQVTKQIA

SEQ ID NO: 35057 - protein, 10 aa, Artificial Sequence
  Description of Artificial Sequence: Synthetic epitope
QASRDQKKTQ

SEQ ID NO: 35058 - protein, 10 aa, Artificial Sequence
  Description of Artificial Sequence: Synthetic epitope
QASREGLSRP

SEQ ID NO: 35059 - protein, 10 aa, Artificial Sequence
  Description of Artificial Sequence: Synthetic epitope
QASREKIIEE

SEQ ID NO: 35060 - protein, 10 aa, Artificial Sequence
  Description of Artificial Sequence: Synthetic epitope
QASRLMLQLQ

SEQ ID NO: 35061 - protein, 10 aa, Artificial Sequence
  Description of Artificial Sequence: Synthetic epitope
QASRQISSKK

SEQ ID NO: 35062 - protein, 10 aa, Artificial Sequence
  Description of Artificial Sequence: Synthetic epitope
QASRQKKMQE

SEQ ID NO: 35063 - protein, 10 aa, Artificial Sequence
  Description of Artificial Sequence: Synthetic epitope
QASRTHLRLS

SEQ ID NO: 35064 - protein, 10 aa, Artificial Sequence
  Description of Artificial Sequence: Synthetic epitope
QASSDYDWNE

SEQ ID NO: 35065 - protein, 10 aa, Artificial Sequence
  Description of Artificial Sequence: Synthetic epitope
QASSEKRITE

SEQ ID NO: 35066 - protein, 10 aa, Artificial Sequence
  Description of Artificial Sequence: Synthetic epitope
QASSGSLDDT

SEQ ID NO: 35067 - protein, 10 aa, Artificial Sequence
  Description of Artificial Sequence: Synthetic epitope
QASSKNDISK

SEQ ID NO: 35068 - protein, 10 aa, Artificial Sequence
  Description of Artificial Sequence: Synthetic epitope
QASSTYAEQT

SEQ ID NO: 35069 - protein, 10 aa, Artificial Sequence
  Description of Artificial Sequence: Synthetic epitope
QASTLETQQD

SEQ ID NO: 35070 - protein, 10 aa, Artificial Sequence
  Description of Artificial Sequence: Synthetic epitope
QASTLQANRE

SEQ ID NO: 35071 - protein, 10 aa, Artificial Sequence
  Description of Artificial Sequence: Synthetic epitope
QASTMSIPVA

SEQ ID NO: 35072 - protein, 10 aa, Artificial Sequence
  Description of Artificial Sequence: Synthetic epitope
QASTQSLAEV

SEQ ID NO: 35073 - protein, 10 aa, Artificial Sequence
  Description of Artificial Sequence: Synthetic epitope
QASTRSRPQS

SEQ ID NO: 35074 - protein, 10 aa, Artificial Sequence
  Description of Artificial Sequence: Synthetic epitope
QASTRTEKRA

SEQ ID NO: 35075 - protein, 10 aa, Artificial Sequence
  Description of Artificial Sequence: Synthetic epitope
QASVASSQPV

SEQ ID NO: 35076 - protein, 10 aa, Artificial Sequence
  Description of Artificial Sequence: Synthetic epitope
QASVATEPQR

SEQ ID NO: 35077 - protein, 10 aa, Artificial Sequence
  Description of Artificial Sequence: Synthetic epitope
QASVRASEGA

SEQ ID NO: 35078 - protein, 10 aa, Artificial Sequence
  Description of Artificial Sequence: Synthetic epitope
QASYTQETPK

SEQ ID NO: 35079 - protein, 10 aa, Artificial Sequence
  Description of Artificial Sequence: Synthetic epitope
QATAAGQQVQ

SEQ ID NO: 35080 - protein, 10 aa, Artificial Sequence
  Description of Artificial Sequence: Synthetic epitope
QATAEITSGE

SEQ ID NO: 35081 - protein, 10 aa, Artificial Sequence
  Description of Artificial Sequence: Synthetic epitope
QATAEKQEES

SEQ ID NO: 35082 - protein, 10 aa, Artificial Sequence
  Description of Artificial Sequence: Synthetic epitope
QATAHAQAQL

SEQ ID NO: 35083 - protein, 10 aa, Artificial Sequence
  Description of Artificial Sequence: Synthetic epitope
QATALKEALQ

SEQ ID NO: 35084 - protein, 10 aa, Artificial Sequence
  Description of Artificial Sequence: Synthetic epitope
QATAQMKEGR

SEQ ID NO: 35085 - protein, 10 aa, Artificial Sequence
  Description of Artificial Sequence: Synthetic epitope
QATATHSIAH

SEQ ID NO: 35086 - protein, 10 aa, Artificial Sequence
  Description of Artificial Sequence: Synthetic epitope
QATEAERSSQ

SEQ ID NO: 35087 - protein, 10 aa, Artificial Sequence
  Description of Artificial Sequence: Synthetic epitope
QATEFSLQQV

SEQ ID NO: 35088 - protein, 10 aa, Artificial Sequence
  Description of Artificial Sequence: Synthetic epitope
QATEIEKARA

SEQ ID NO: 35089 - protein, 10 aa, Artificial Sequence
  Description of Artificial Sequence: Synthetic epitope
QATEQSIHAT

SEQ ID NO: 35090 - protein, 10 aa, Artificial Sequence
  Description of Artificial Sequence: Synthetic epitope
QATERLKMEQ

SEQ ID NO: 35091 - protein, 10 aa, Artificial Sequence
  Description of Artificial Sequence: Synthetic epitope
QATEVSVPQV

SEQ ID NO: 35092 - protein, 10 aa, Artificial Sequence
  Description of Artificial Sequence: Synthetic epitope
QATGKASELE

SEQ ID NO: 35093 - protein, 10 aa, Artificial Sequence
  Description of Artificial Sequence: Synthetic epitope
QATISFPKRK

SEQ ID NO: 35094 - protein, 10 aa, Artificial Sequence
  Description of Artificial Sequence: Synthetic epitope
QATISKSQTN

SEQ ID NO: 35095 - protein, 10 aa, Artificial Sequence
  Description of Artificial Sequence: Synthetic epitope
QATKAKPDEP

SEQ ID NO: 35096 - protein, 10 aa, Artificial Sequence
  Description of Artificial Sequence: Synthetic epitope
QATKEILAQK

SEQ ID NO: 35097 - protein, 10 aa, Artificial Sequence
  Description of Artificial Sequence: Synthetic epitope
QATKRTRSEG

SEQ ID NO: 35098 - protein, 10 aa, Artificial Sequence
  Description of Artificial Sequence: Synthetic epitope
QATLQLNNSN

SEQ ID NO: 35099 - protein, 10 aa, Artificial Sequence
  Description of Artificial Sequence: Synthetic epitope
QATLSLAVRE

SEQ ID NO: 35100 - protein, 10 aa, Artificial Sequence
  Description of Artificial Sequence: Synthetic epitope
QATLTLTQGP

SEQ ID NO: 35101 - protein, 10 aa, Artificial Sequence
  Description of Artificial Sequence: Synthetic epitope
QATMSGKSQE

SEQ ID NO: 35102 - protein, 10 aa, Artificial Sequence
  Description of Artificial Sequence: Synthetic epitope
QATQAIPMER

SEQ ID NO: 35103 - protein, 10 aa, Artificial Sequence
  Description of Artificial Sequence: Synthetic epitope
QATQAQVPAS

SEQ ID NO: 35104 - protein, 10 aa, Artificial Sequence
  Description of Artificial Sequence: Synthetic epitope
QATQDQQRSE

SEQ ID NO: 35105 - protein, 10 aa, Artificial Sequence
  Description of Artificial Sequence: Synthetic epitope
QATQEAQEQL

SEQ ID NO: 35106 - protein, 10 aa, Artificial Sequence
  Description of Artificial Sequence: Synthetic epitope
QATQKSLPQG

SEQ ID NO: 35107 - protein, 10 aa, Artificial Sequence
  Description of Artificial Sequence: Synthetic epitope
QATQMTQEVT

SEQ ID NO: 35108 - protein, 10 aa, Artificial Sequence
  Description of Artificial Sequence: Synthetic epitope
QATQQRTATQ

SEQ ID NO: 35109 - protein, 10 aa, Artificial Sequence
  Description of Artificial Sequence: Synthetic epitope
QATQTARKML

SEQ ID NO: 35110 - protein, 10 aa, Artificial Sequence
  Description of Artificial Sequence: Synthetic epitope
QATRQRLSIP

SEQ ID NO: 35111 - protein, 10 aa, Artificial Sequence
  Description of Artificial Sequence: Synthetic epitope
QATSHRKTSL

SEQ ID NO: 35112 - protein, 10 aa, Artificial Sequence
  Description of Artificial Sequence: Synthetic epitope
QATSKKGISR

SEQ ID NO: 35113 - protein, 10 aa, Artificial Sequence
  Description of Artificial Sequence: Synthetic epitope
QATSRLSTAS

SEQ ID NO: 35114 - protein, 10 aa, Artificial Sequence
  Description of Artificial Sequence: Synthetic epitope
QATSRNGHSA

SEQ ID NO: 35115 - protein, 10 aa, Artificial Sequence
  Description of Artificial Sequence: Synthetic epitope
QATTKSLIEG

SEQ ID NO: 35116 - protein, 10 aa, Artificial Sequence
  Description of Artificial Sequence: Synthetic epitope
QATTSTESSV

SEQ ID NO: 35117 - protein, 10 aa, Artificial Sequence
  Description of Artificial Sequence: Synthetic epitope
QATVEEGAVG

SEQ ID NO: 35118 - protein, 10 aa, Artificial Sequence
  Description of Artificial Sequence: Synthetic epitope
QATVETTRSL

SEQ ID NO: 35119 - protein, 10 aa, Artificial Sequence
  Description of Artificial Sequence: Synthetic epitope
QATVRDAVVG

SEQ ID NO: 35120 - protein, 10 aa, Artificial Sequence
  Description of Artificial Sequence: Synthetic epitope
QAVAKATQQP

SEQ ID NO: 35121 - protein, 10 aa, Artificial Sequence
  Description of Artificial Sequence: Synthetic epitope
QAVALRAKAF

SEQ ID NO: 35122 - protein, 10 aa, Artificial Sequence
  Description of Artificial Sequence: Synthetic epitope
QAVANKLISS

SEQ ID NO: 35123 - protein, 10 aa, Artificial Sequence
  Description of Artificial Sequence: Synthetic epitope
QAVATPSRSS

SEQ ID NO: 35124 - protein, 10 aa, Artificial Sequence
  Description of Artificial Sequence: Synthetic epitope
QAVATSLLPL

SEQ ID NO: 35125 - protein, 10 aa, Artificial Sequence
  Description of Artificial Sequence: Synthetic epitope
QAVATVASRP

SEQ ID NO: 35126 - protein, 10 aa, Artificial Sequence
  Description of Artificial Sequence: Synthetic epitope
QAVEATQGQQ

SEQ ID NO: 35127 - protein, 10 aa, Artificial Sequence
  Description of Artificial Sequence: Synthetic epitope
QAVEKKLVEE

SEQ ID NO: 35128 - protein, 10 aa, Artificial Sequence
  Description of Artificial Sequence: Synthetic epitope
QAVEQQAKKR

SEQ ID NO: 35129 - protein, 10 aa, Artificial Sequence
  Description of Artificial Sequence: Synthetic epitope
QAVGQLVQKE

SEQ ID NO: 35130 - protein, 10 aa, Artificial Sequence
  Description of Artificial Sequence: Synthetic epitope
QAVGSQQFSQ

SEQ ID NO: 35131 - protein, 10 aa, Artificial Sequence
  Description of Artificial Sequence: Synthetic epitope
QAVGTLQTQT

SEQ ID NO: 35132 - protein, 10 aa, Artificial Sequence
  Description of Artificial Sequence: Synthetic epitope
QAVIDSLALD

SEQ ID NO: 35133 - protein, 10 aa, Artificial Sequence
  Description of Artificial Sequence: Synthetic epitope
QAVIIATQSA

SEQ ID NO: 35134 - protein, 10 aa, Artificial Sequence
  Description of Artificial Sequence: Synthetic epitope
QAVITQMEEV

SEQ ID NO: 35135 - protein, 10 aa, Artificial Sequence
  Description of Artificial Sequence: Synthetic epitope
QAVKDKARQA

SEQ ID NO: 35136 - protein, 10 aa, Artificial Sequence
  Description of Artificial Sequence: Synthetic epitope
QAVKKATHGT

SEQ ID NO: 35137 - protein, 10 aa, Artificial Sequence
  Description of Artificial Sequence: Synthetic epitope
QAVKKDQEGD

SEQ ID NO: 35138 - protein, 10 aa, Artificial Sequence
  Description of Artificial Sequence: Synthetic epitope
QAVKSGKQLS

SEQ ID NO: 35139 - protein, 10 aa, Artificial Sequence
  Description of Artificial Sequence: Synthetic epitope
QAVLPQIKAQ

SEQ ID NO: 35140 - protein, 10 aa, Artificial Sequence
  Description of Artificial Sequence: Synthetic epitope
QAVLQKTMEQ

SEQ ID NO: 35141 - protein, 10 aa, Artificial Sequence
  Description of Artificial Sequence: Synthetic epitope
QAVNARALPA

SEQ ID NO: 35142 - protein, 10 aa, Artificial Sequence
  Description of Artificial Sequence: Synthetic epitope
QAVNQPLMPL

SEQ ID NO: 35143 - protein, 10 aa, Artificial Sequence
  Description of Artificial Sequence: Synthetic epitope
QAVNVTDRRL

SEQ ID NO: 35144 - protein, 10 aa, Artificial Sequence
  Description of Artificial Sequence: Synthetic epitope
QAVPQANHTE

SEQ ID NO: 35145 - protein, 10 aa, Artificial Sequence
  Description of Artificial Sequence: Synthetic epitope
QAVQASIASA

SEQ ID NO: 35146 - protein, 10 aa, Artificial Sequence
  Description of Artificial Sequence: Synthetic epitope
QAVQATKNYN

SEQ ID NO: 35147 - protein, 10 aa, Artificial Sequence
  Description of Artificial Sequence: Synthetic epitope
QAVQDVKTNP

SEQ ID NO: 35148 - protein, 10 aa, Artificial Sequence
  Description of Artificial Sequence: Synthetic epitope
QAVQGLLVAQ

SEQ ID NO: 35149 - protein, 10 aa, Artificial Sequence
  Description of Artificial Sequence: Synthetic epitope
QAVQIKKMEP

SEQ ID NO: 35150 - protein, 10 aa, Artificial Sequence
  Description of Artificial Sequence: Synthetic epitope
QAVQRAAQAP

SEQ ID NO: 35151 - protein, 10 aa, Artificial Sequence
  Description of Artificial Sequence: Synthetic epitope
QAVQSDPTQS

SEQ ID NO: 35152 - protein, 10 aa, Artificial Sequence
  Description of Artificial Sequence: Synthetic epitope
QAVQSQYEEK

SEQ ID NO: 35153 - protein, 10 aa, Artificial Sequence
  Description of Artificial Sequence: Synthetic epitope
QAVQTARLVQ

SEQ ID NO: 35154 - protein, 10 aa, Artificial Sequence
  Description of Artificial Sequence: Synthetic epitope
QAVRAALNLP

SEQ ID NO: 35155 - protein, 10 aa, Artificial Sequence
  Description of Artificial Sequence: Synthetic epitope
QAVSKDRNAE

SEQ ID NO: 35156 - protein, 10 aa, Artificial Sequence
  Description of Artificial Sequence: Synthetic epitope
QAVSPKVDDQ

SEQ ID NO: 35157 - protein, 10 aa, Artificial Sequence
  Description of Artificial Sequence: Synthetic epitope
QAVSSLNSSH

SEQ ID NO: 35158 - protein, 10 aa, Artificial Sequence
  Description of Artificial Sequence: Synthetic epitope
QAVTEENIAS

SEQ ID NO: 35159 - protein, 10 aa, Artificial Sequence
  Description of Artificial Sequence: Synthetic epitope
QAVTRNYITH

SEQ ID NO: 35160 - protein, 10 aa, Artificial Sequence
  Description of Artificial Sequence: Synthetic epitope
QAVTVYLKKL

SEQ ID NO: 35161 - protein, 10 aa, Artificial Sequence
  Description of Artificial Sequence: Synthetic epitope
QAVVALAVGR

SEQ ID NO: 35162 - protein, 10 aa, Artificial Sequence
  Description of Artificial Sequence: Synthetic epitope
QAVVSAAQAG

SEQ ID NO: 35163 - protein, 10 aa, Artificial Sequence
  Description of Artificial Sequence: Synthetic epitope
QAVVSMQAFQ

SEQ ID NO: 35164 - protein, 10 aa, Artificial Sequence
  Description of Artificial Sequence: Synthetic epitope
QAVYKQTMKL

SEQ ID NO: 35165 - protein, 10 aa, Artificial Sequence
  Description of Artificial Sequence: Synthetic epitope
QAVYSMMSWP

SEQ ID NO: 35166 - protein, 10 aa, Artificial Sequence
  Description of Artificial Sequence: Synthetic epitope
QAWAQEAGPN

SEQ ID NO: 35167 - protein, 10 aa, Artificial Sequence
  Description of Artificial Sequence: Synthetic epitope
QAWHPRALLQ

SEQ ID NO: 35168 - protein, 10 aa, Artificial Sequence
  Description of Artificial Sequence: Synthetic epitope
QAWILNATLR

SEQ ID NO: 35169 - protein, 10 aa, Artificial Sequence
  Description of Artificial Sequence: Synthetic epitope
QAWKILGNEE

SEQ ID NO: 35170 - protein, 10 aa, Artificial Sequence
  Description of Artificial Sequence: Synthetic epitope
QAWPGRQSQE

SEQ ID NO: 35171 - protein, 10 aa, Artificial Sequence
  Description of Artificial Sequence: Synthetic epitope
QAYERNAPQD

SEQ ID NO: 35172 - protein, 10 aa, Artificial Sequence
  Description of Artificial Sequence: Synthetic epitope
QAYGMDVNHG

SEQ ID NO: 35173 - protein, 10 aa, Artificial Sequence
  Description of Artificial Sequence: Synthetic epitope
QAYKPQNPKD

SEQ ID NO: 35174 - protein, 10 aa, Artificial Sequence
  Description of Artificial Sequence: Synthetic epitope
QAYKRMAEEA

SEQ ID NO: 35175 - protein, 10 aa, Artificial Sequence
  Description of Artificial Sequence: Synthetic epitope
QAYLESSEAL

SEQ ID NO: 35176 - protein, 10 aa, Artificial Sequence
  Description of Artificial Sequence: Synthetic epitope
QAYQSTSGPP

SEQ ID NO: 35177 - protein, 10 aa, Artificial Sequence
  Description of Artificial Sequence: Synthetic epitope
QAYSKLSNSI

SEQ ID NO: 35178 - protein, 10 aa, Artificial Sequence
  Description of Artificial Sequence: Synthetic epitope
QCDFRANPNE

SEQ ID NO: 35179 - protein, 10 aa, Artificial Sequence
  Description of Artificial Sequence: Synthetic epitope
QDAEASEGPE

SEQ ID NO: 35180 - protein, 10 aa, Artificial Sequence
  Description of Artificial Sequence: Synthetic epitope
QDAEIMAGKS

SEQ ID NO: 35181 - protein, 10 aa, Artificial Sequence
  Description of Artificial Sequence: Synthetic epitope
QDAESRQVLA

SEQ ID NO: 35182 - protein, 10 aa, Artificial Sequence
  Description of Artificial Sequence: Synthetic epitope
QDAEYMDVVE

SEQ ID NO: 35183 - protein, 10 aa, Artificial Sequence
  Description of Artificial Sequence: Synthetic epitope
QDAIAKVEDE

SEQ ID NO: 35184 - protein, 10 aa, Artificial Sequence
  Description of Artificial Sequence: Synthetic epitope
QDAKTKLAQL

SEQ ID NO: 35185 - protein, 10 aa, Artificial Sequence
  Description of Artificial Sequence: Synthetic epitope
QDANATLWAF

SEQ ID NO: 35186 - protein, 10 aa, Artificial Sequence
  Description of Artificial Sequence: Synthetic epitope
QDAQGQETTV

SEQ ID NO: 35187 - protein, 10 aa, Artificial Sequence
  Description of Artificial Sequence: Synthetic epitope
QDAQRIEDSV

SEQ ID NO: 35188 - protein, 10 aa, Artificial Sequence
  Description of Artificial Sequence: Synthetic epitope
QDARNHVSQA

SEQ ID NO: 35189 - protein, 10 aa, Artificial Sequence
  Description of Artificial Sequence: Synthetic epitope
QDARQSLALQ

SEQ ID NO: 35190 - protein, 10 aa, Artificial Sequence
  Description of Artificial Sequence: Synthetic epitope
QDASSQVKRE

SEQ ID NO: 35191 - protein, 10 aa, Artificial Sequence
  Description of Artificial Sequence: Synthetic epitope
QDASVRSPIP

SEQ ID NO: 35192 - protein, 10 aa, Artificial Sequence
  Description of Artificial Sequence: Synthetic epitope
QDATASLILL

SEQ ID NO: 35193 - protein, 10 aa, Artificial Sequence
  Description of Artificial Sequence: Synthetic epitope
QDATPVSNSL

SEQ ID NO: 35194 - protein, 10 aa, Artificial Sequence
  Description of Artificial Sequence: Synthetic epitope
QDAVSQLDSE

SEQ ID NO: 35195 - protein, 10 aa, Artificial Sequence
  Description of Artificial Sequence: Synthetic epitope
QDDELGKKQF

SEQ ID NO: 35196 - protein, 10 aa, Artificial Sequence
  Description of Artificial Sequence: Synthetic epitope
QDDHVSLESA

SEQ ID NO: 35197 - protein, 10 aa, Artificial Sequence
  Description of Artificial Sequence: Synthetic epitope
QDDKQILENL

SEQ ID NO: 35198 - protein, 10 aa, Artificial Sequence
  Description of Artificial Sequence: Synthetic epitope
QDDLPSTDES

SEQ ID NO: 35199 - protein, 10 aa, Artificial Sequence
  Description of Artificial Sequence: Synthetic epitope
QDDSLSQIDK

SEQ ID NO: 35200 - protein, 10 aa, Artificial Sequence
  Description of Artificial Sequence: Synthetic epitope
QDDSLSSLLV

SEQ ID NO: 35201 - protein, 10 aa, Artificial Sequence
  Description of Artificial Sequence: Synthetic epitope
QDEAASADGE

SEQ ID NO: 35202 - protein, 10 aa, Artificial Sequence
  Description of Artificial Sequence: Synthetic epitope
QDEADAALQM

SEQ ID NO: 35203 - protein, 10 aa, Artificial Sequence
  Description of Artificial Sequence: Synthetic epitope
QDEDAPHDHS

SEQ ID NO: 35204 - protein, 10 aa, Artificial Sequence
  Description of Artificial Sequence: Synthetic epitope
QDEEANTDDL

SEQ ID NO: 35205 - protein, 10 aa, Artificial Sequence
  Description of Artificial Sequence: Synthetic epitope
QDEGATRALG

SEQ ID NO: 35206 - protein, 10 aa, Artificial Sequence
  Description of Artificial Sequence: Synthetic epitope
QDEGTGEQLS

SEQ ID NO: 35207 - protein, 10 aa, Artificial Sequence
  Description of Artificial Sequence: Synthetic epitope
QDELDQTLEE

SEQ ID NO: 35208 - protein, 10 aa, Artificial Sequence
  Description of Artificial Sequence: Synthetic epitope
QDELKHESTY

SEQ ID NO: 35209 - protein, 10 aa, Artificial Sequence
  Description of Artificial Sequence: Synthetic epitope
QDEMSESGQS

SEQ ID NO: 35210 - protein, 10 aa, Artificial Sequence
  Description of Artificial Sequence: Synthetic epitope
QDEPIALDKQ

SEQ ID NO: 35211 - protein, 10 aa, Artificial Sequence
  Description of Artificial Sequence: Synthetic epitope
QDERDVQSQS

SEQ ID NO: 35212 - protein, 10 aa, Artificial Sequence
  Description of Artificial Sequence: Synthetic epitope
QDESLDPVIQ

SEQ ID NO: 35213 - protein, 10 aa, Artificial Sequence
  Description of Artificial Sequence: Synthetic epitope
QDESNQAEEP

SEQ ID NO: 35214 - protein, 10 aa, Artificial Sequence
  Description of Artificial Sequence: Synthetic epitope
QDESSQTSLQ

SEQ ID NO: 35215 - protein, 10 aa, Artificial Sequence
  Description of Artificial Sequence: Synthetic epitope
QDESTQEDAM

SEQ ID NO: 35216 - protein, 10 aa, Artificial Sequence
  Description of Artificial Sequence: Synthetic epitope
QDETKQAQEE

SEQ ID NO: 35217 - protein, 10 aa, Artificial Sequence
  Description of Artificial Sequence: Synthetic epitope
QDETLNSSVQ

SEQ ID NO: 35218 - protein, 10 aa, Artificial Sequence
  Description of Artificial Sequence: Synthetic epitope
QDETMMTDLS

SEQ ID NO: 35219 - protein, 10 aa, Artificial Sequence
  Description of Artificial Sequence: Synthetic epitope
QDETVADTNK

SEQ ID NO: 35220 - protein, 10 aa, Artificial Sequence
  Description of Artificial Sequence: Synthetic epitope
QDETVMLVKE

SEQ ID NO: 35221 - protein, 10 aa, Artificial Sequence
  Description of Artificial Sequence: Synthetic epitope
QDEVLKLKLG

SEQ ID NO: 35222 - protein, 10 aa, Artificial Sequence
  Description of Artificial Sequence: Synthetic epitope
QDFEATIAER

SEQ ID NO: 35223 - protein, 10 aa, Artificial Sequence
  Description of Artificial Sequence: Synthetic epitope
QDFLIVISKG

SEQ ID NO: 35224 - protein, 10 aa, Artificial Sequence
  Description of Artificial Sequence: Synthetic epitope
QDFLTTSEAM

SEQ ID NO: 35225 - protein, 10 aa, Artificial Sequence
  Description of Artificial Sequence: Synthetic epitope
QDFRQVSSVI

SEQ ID NO: 35226 - protein, 10 aa, Artificial Sequence
  Description of Artificial Sequence: Synthetic epitope
QDFRRNILNV

SEQ ID NO: 35227 - protein, 10 aa, Artificial Sequence
  Description of Artificial Sequence: Synthetic epitope
QDFRSLNDST

SEQ ID NO: 35228 - protein, 10 aa, Artificial Sequence
  Description of Artificial Sequence: Synthetic epitope
QDGAETSVAL

SEQ ID NO: 35229 - protein, 10 aa, Artificial Sequence
  Description of Artificial Sequence: Synthetic epitope
QDGAQVEAKA

SEQ ID NO: 35230 - protein, 10 aa, Artificial Sequence
  Description of Artificial Sequence: Synthetic epitope
QDGGQKAVKD

SEQ ID NO: 35231 - protein, 10 aa, Artificial Sequence
  Description of Artificial Sequence: Synthetic epitope
QDGHKAKKPA

SEQ ID NO: 35232 - protein, 10 aa, Artificial Sequence
  Description of Artificial Sequence: Synthetic epitope
QDGQSAASRA

SEQ ID NO: 35233 - protein, 10 aa, Artificial Sequence
  Description of Artificial Sequence: Synthetic epitope
QDGSTVFKVV

SEQ ID NO: 35234 - protein, 10 aa, Artificial Sequence
  Description of Artificial Sequence: Synthetic epitope
QDGTDVSLAR

SEQ ID NO: 35235 - protein, 10 aa, Artificial Sequence
  Description of Artificial Sequence: Synthetic epitope
QDGWRDMGYT

SEQ ID NO: 35236 - protein, 10 aa, Artificial Sequence
  Description of Artificial Sequence: Synthetic epitope
QDHDQSVTSR

SEQ ID NO: 35237 - protein, 10 aa, Artificial Sequence
  Description of Artificial Sequence: Synthetic epitope
QDHNAILDFE

SEQ ID NO: 35238 - protein, 10 aa, Artificial Sequence
  Description of Artificial Sequence: Synthetic epitope
QDHQAFRRKN

SEQ ID NO: 35239 - protein, 10 aa, Artificial Sequence
  Description of Artificial Sequence: Synthetic epitope
QDHSRFLSSP

SEQ ID NO: 35240 - protein, 10 aa, Artificial Sequence
  Description of Artificial Sequence: Synthetic epitope
QDHTSKKDPG

SEQ ID NO: 35241 - protein, 10 aa, Artificial Sequence
  Description of Artificial Sequence: Synthetic epitope
QDIAEVDHSE

SEQ ID NO: 35242 - protein, 10 aa, Artificial Sequence
  Description of Artificial Sequence: Synthetic epitope
QDIALILPSS

SEQ ID NO: 35243 - protein, 10 aa, Artificial Sequence
  Description of Artificial Sequence: Synthetic epitope
QDIEILKIRK

SEQ ID NO: 35244 - protein, 10 aa, Artificial Sequence
  Description of Artificial Sequence: Synthetic epitope
QDIIMILESS

SEQ ID NO: 35245 - protein, 10 aa, Artificial Sequence
  Description of Artificial Sequence: Synthetic epitope
QDILSYNLSL

SEQ ID NO: 35246 - protein, 10 aa, Artificial Sequence
  Description of Artificial Sequence: Synthetic epitope
QDINFEQPYE

SEQ ID NO: 35247 - protein, 10 aa, Artificial Sequence
  Description of Artificial Sequence: Synthetic epitope
QDIPKLQKLG

SEQ ID NO: 35248 - protein, 10 aa, Artificial Sequence
  Description of Artificial Sequence: Synthetic epitope
QDIQRSSAKP

SEQ ID NO: 35249 - protein, 10 aa, Artificial Sequence
  Description of Artificial Sequence: Synthetic epitope
QDIQTDNSDI

SEQ ID NO: 35250 - protein, 10 aa, Artificial Sequence
  Description of Artificial Sequence: Synthetic epitope
QDIRGTKTEQ

SEQ ID NO: 35251 - protein, 10 aa, Artificial Sequence
  Description of Artificial Sequence: Synthetic epitope
QDIRSVWRAI

SEQ ID NO: 35252 - protein, 10 aa, Artificial Sequence
  Description of Artificial Sequence: Synthetic epitope
QDIRYSQMEK

SEQ ID NO: 35253 - protein, 10 aa, Artificial Sequence
  Description of Artificial Sequence: Synthetic epitope
QDITVVKSMK

SEQ ID NO: 35254 - protein, 10 aa, Artificial Sequence
  Description of Artificial Sequence: Synthetic epitope
QDKAAMQLSE

SEQ ID NO: 35255 - protein, 10 aa, Artificial Sequence
  Description of Artificial Sequence: Synthetic epitope
QDKAASSKEK

SEQ ID NO: 35256 - protein, 10 aa, Artificial Sequence
  Description of Artificial Sequence: Synthetic epitope
QDKAKISLGS

SEQ ID NO: 35257 - protein, 10 aa, Artificial Sequence
  Description of Artificial Sequence: Synthetic epitope
QDKAPDSSQI

SEQ ID NO: 35258 - protein, 10 aa, Artificial Sequence
  Description of Artificial Sequence: Synthetic epitope
QDKASEKVSL

SEQ ID NO: 35259 - protein, 10 aa, Artificial Sequence
  Description of Artificial Sequence: Synthetic epitope
QDKDRISAMQ

SEQ ID NO: 35260 - protein, 10 aa, Artificial Sequence
  Description of Artificial Sequence: Synthetic epitope
QDKGTDERQP

SEQ ID NO: 35261 - protein, 10 aa, Artificial Sequence
  Description of Artificial Sequence: Synthetic epitope
QDKIEEQSQS

SEQ ID NO: 35262 - protein, 10 aa, Artificial Sequence
  Description of Artificial Sequence: Synthetic epitope
QDKKLMAMFL

SEQ ID NO: 35263 - protein, 10 aa, Artificial Sequence
  Description of Artificial Sequence: Synthetic epitope
QDKLNKTKDD

SEQ ID NO: 35264 - protein, 10 aa, Artificial Sequence
  Description of Artificial Sequence: Synthetic epitope
QDKMTNAKNR

SEQ ID NO: 35265 - protein, 10 aa, Artificial Sequence
  Description of Artificial Sequence: Synthetic epitope
QDKPKIATAN

SEQ ID NO: 35266 - protein, 10 aa, Artificial Sequence
  Description of Artificial Sequence: Synthetic epitope
QDKPNQQDIV

SEQ ID NO: 35267 - protein, 10 aa, Artificial Sequence
  Description of Artificial Sequence: Synthetic epitope
QDKRMEIDKH

SEQ ID NO: 35268 - protein, 10 aa, Artificial Sequence
  Description of Artificial Sequence: Synthetic epitope
QDKSAVIAKN

SEQ ID NO: 35269 - protein, 10 aa, Artificial Sequence
  Description of Artificial Sequence: Synthetic epitope
QDKSEKAYSS

SEQ ID NO: 35270 - protein, 10 aa, Artificial Sequence
  Description of Artificial Sequence: Synthetic epitope
QDKSETINPK

SEQ ID NO: 35271 - protein, 10 aa, Artificial Sequence
  Description of Artificial Sequence: Synthetic epitope
QDKSNEILTA

SEQ ID NO: 35272 - protein, 10 aa, Artificial Sequence
  Description of Artificial Sequence: Synthetic epitope
QDKTYTRMKR

SEQ ID NO: 35273 - protein, 10 aa, Artificial Sequence
  Description of Artificial Sequence: Synthetic epitope
QDKVAQLQVE

SEQ ID NO: 35274 - protein, 10 aa, Artificial Sequence
  Description of Artificial Sequence: Synthetic epitope
QDKVQPVSEI

SEQ ID NO: 35275 - protein, 10 aa, Artificial Sequence
  Description of Artificial Sequence: Synthetic epitope
QDKYQQTRKT

SEQ ID NO: 35276 - protein, 10 aa, Artificial Sequence
  Description of Artificial Sequence: Synthetic epitope
QDLATNEVTT

SEQ ID NO: 35277 - protein, 10 aa, Artificial Sequence
  Description of Artificial Sequence: Synthetic epitope
QDLATRQELM

SEQ ID NO: 35278 - protein, 10 aa, Artificial Sequence
  Description of Artificial Sequence: Synthetic epitope
QDLDDFVDQE

SEQ ID NO: 35279 - protein, 10 aa, Artificial Sequence
  Description of Artificial Sequence: Synthetic epitope
QDLDVSLLEG

SEQ ID NO: 35280 - protein, 10 aa, Artificial Sequence
  Description of Artificial Sequence: Synthetic epitope
QDLENAASGD

SEQ ID NO: 35281 - protein, 10 aa, Artificial Sequence
  Description of Artificial Sequence: Synthetic epitope
QDLENAASGD

SEQ ID NO: 35282 - protein, 10 aa, Artificial Sequence
  Description of Artificial Sequence: Synthetic epitope
QDLGATQATV

SEQ ID NO: 35283 - protein, 10 aa, Artificial Sequence
  Description of Artificial Sequence: Synthetic epitope
QDLGSSRAML

SEQ ID NO: 35284 - protein, 10 aa, Artificial Sequence
  Description of Artificial Sequence: Synthetic epitope
QDLHATIQNW

SEQ ID NO: 35285 - protein, 10 aa, Artificial Sequence
  Description of Artificial Sequence: Synthetic epitope
QDLHEAQAER

SEQ ID NO: 35286 - protein, 10 aa, Artificial Sequence
  Description of Artificial Sequence: Synthetic epitope
QDLISLILVE

SEQ ID NO: 35287 - protein, 10 aa, Artificial Sequence
  Description of Artificial Sequence: Synthetic epitope
QDLKALVAEI

SEQ ID NO: 35288 - protein, 10 aa, Artificial Sequence
  Description of Artificial Sequence: Synthetic epitope
QDLKESRLVE

SEQ ID NO: 35289 - protein, 10 aa, Artificial Sequence
  Description of Artificial Sequence: Synthetic epitope
QDLKIRALDT

SEQ ID NO: 35290 - protein, 10 aa, Artificial Sequence
  Description of Artificial Sequence: Synthetic epitope
QDLLASRRVE

SEQ ID NO: 35291 - protein, 10 aa, Artificial Sequence
  Description of Artificial Sequence: Synthetic epitope
QDLLKNEQNQ

SEQ ID NO: 35292 - protein, 10 aa, Artificial Sequence
  Description of Artificial Sequence: Synthetic epitope
QDLMAVIQAY

SEQ ID NO: 35293 - protein, 10 aa, Artificial Sequence
  Description of Artificial Sequence: Synthetic epitope
QDLMTNGYVS

SEQ ID NO: 35294 - protein, 10 aa, Artificial Sequence
  Description of Artificial Sequence: Synthetic epitope
QDLNKTSRQQ

SEQ ID NO: 35295 - protein, 10 aa, Artificial Sequence
  Description of Artificial Sequence: Synthetic epitope
QDLNRISQPK

SEQ ID NO: 35296 - protein, 10 aa, Artificial Sequence
  Description of Artificial Sequence: Synthetic epitope
QDLNTKYVKS

SEQ ID NO: 35297 - protein, 10 aa, Artificial Sequence
  Description of Artificial Sequence: Synthetic epitope
QDLPFRRSWS

SEQ ID NO: 35298 - protein, 10 aa, Artificial Sequence
  Description of Artificial Sequence: Synthetic epitope
QDLPTVSFGK

SEQ ID NO: 35299 - protein, 10 aa, Artificial Sequence
  Description of Artificial Sequence: Synthetic epitope
QDLQEEADKK

SEQ ID NO: 35300 - protein, 10 aa, Artificial Sequence
  Description of Artificial Sequence: Synthetic epitope
QDLRSSQRLQ

SEQ ID NO: 35301 - protein, 10 aa, Artificial Sequence
  Description of Artificial Sequence: Synthetic epitope
QDLSSKKQQS

SEQ ID NO: 35302 - protein, 10 aa, Artificial Sequence
  Description of Artificial Sequence: Synthetic epitope
QDLTALLSSK

SEQ ID NO: 35303 - protein, 10 aa, Artificial Sequence
  Description of Artificial Sequence: Synthetic epitope
QDLTMAPGST

SEQ ID NO: 35304 - protein, 10 aa, Artificial Sequence
  Description of Artificial Sequence: Synthetic epitope
QDLTRRESSA

SEQ ID NO: 35305 - protein, 10 aa, Artificial Sequence
  Description of Artificial Sequence: Synthetic epitope
QDLVDAVRAE

SEQ ID NO: 35306 - protein, 10 aa, Artificial Sequence
  Description of Artificial Sequence: Synthetic epitope
QDLVTAEKPI

SEQ ID NO: 35307 - protein, 10 aa, Artificial Sequence
  Description of Artificial Sequence: Synthetic epitope
QDMADFANLP

SEQ ID NO: 35308 - protein, 10 aa, Artificial Sequence
  Description of Artificial Sequence: Synthetic epitope
QDMASIAPDN

SEQ ID NO: 35309 - protein, 10 aa, Artificial Sequence
  Description of Artificial Sequence: Synthetic epitope
QDMEVNESAQ

SEQ ID NO: 35310 - protein, 10 aa, Artificial Sequence
  Description of Artificial Sequence: Synthetic epitope
QDMFDKKTKA

SEQ ID NO: 35311 - protein, 10 aa, Artificial Sequence
  Description of Artificial Sequence: Synthetic epitope
QDMIDHEHPE

SEQ ID NO: 35312 - protein, 10 aa, Artificial Sequence
  Description of Artificial Sequence: Synthetic epitope
QDMKTASSTS

SEQ ID NO: 35313 - protein, 10 aa, Artificial Sequence
  Description of Artificial Sequence: Synthetic epitope
QDMLANLRDV

SEQ ID NO: 35314 - protein, 10 aa, Artificial Sequence
  Description of Artificial Sequence: Synthetic epitope
QDMPLVGAEK

SEQ ID NO: 35315 - protein, 10 aa, Artificial Sequence
  Description of Artificial Sequence: Synthetic epitope
QDNAADQSRM

SEQ ID NO: 35316 - protein, 10 aa, Artificial Sequence
  Description of Artificial Sequence: Synthetic epitope
QDNELAIDLR

SEQ ID NO: 35317 - protein, 10 aa, Artificial Sequence
  Description of Artificial Sequence: Synthetic epitope
QDNESRLAST

SEQ ID NO: 35318 - protein, 10 aa, Artificial Sequence
  Description of Artificial Sequence: Synthetic epitope
QDNSFSSTTV

SEQ ID NO: 35319 - protein, 10 aa, Artificial Sequence
  Description of Artificial Sequence: Synthetic epitope
QDNTAQTSAY

SEQ ID NO: 35320 - protein, 10 aa, Artificial Sequence
  Description of Artificial Sequence: Synthetic epitope
QDNYEIRYTA

SEQ ID NO: 35321 - protein, 10 aa, Artificial Sequence
  Description of Artificial Sequence: Synthetic epitope
QDPTAQSLAA

SEQ ID NO: 35322 - protein, 10 aa, Artificial Sequence
  Description of Artificial Sequence: Synthetic epitope
QDQDQKLLEQ

SEQ ID NO: 35323 - protein, 10 aa, Artificial Sequence
  Description of Artificial Sequence: Synthetic epitope
QDQETALSAM

SEQ ID NO: 35324 - protein, 10 aa, Artificial Sequence
  Description of Artificial Sequence: Synthetic epitope
QDQETALSAM

SEQ ID NO: 35325 - protein, 10 aa, Artificial Sequence
  Description of Artificial Sequence: Synthetic epitope
QDQGSKMLLD

SEQ ID NO: 35326 - protein, 10 aa, Artificial Sequence
  Description of Artificial Sequence: Synthetic epitope
QDQHSVVGQN

SEQ ID NO: 35327 - protein, 10 aa, Artificial Sequence
  Description of Artificial Sequence: Synthetic epitope
QDQITAQNDT

SEQ ID NO: 35328 - protein, 10 aa, Artificial Sequence
  Description of Artificial Sequence: Synthetic epitope
QDQKDANISQ

SEQ ID NO: 35329 - protein, 10 aa, Artificial Sequence
  Description of Artificial Sequence: Synthetic epitope
QDQKIVHKGD

SEQ ID NO: 35330 - protein, 10 aa, Artificial Sequence
  Description of Artificial Sequence: Synthetic epitope
QDQKNSKEVD

SEQ ID NO: 35331 - protein, 10 aa, Artificial Sequence
  Description of Artificial Sequence: Synthetic epitope
QDQKVVLSSG

SEQ ID NO: 35332 - protein, 10 aa, Artificial Sequence
  Description of Artificial Sequence: Synthetic epitope
QDQLALDLLS

SEQ ID NO: 35333 - protein, 10 aa, Artificial Sequence
  Description of Artificial Sequence: Synthetic epitope
QDQLRVRVTE

SEQ ID NO: 35334 - protein, 10 aa, Artificial Sequence
  Description of Artificial Sequence: Synthetic epitope
QDQNNYLQSD

SEQ ID NO: 35335 - protein, 10 aa, Artificial Sequence
  Description of Artificial Sequence: Synthetic epitope
QDQNQKMMLE

SEQ ID NO: 35336 - protein, 10 aa, Artificial Sequence
  Description of Artificial Sequence: Synthetic epitope
QDQNRLSQNS

SEQ ID NO: 35337 - protein, 10 aa, Artificial Sequence
  Description of Artificial Sequence: Synthetic epitope
QDQPLVEANH

SEQ ID NO: 35338 - protein, 10 aa, Artificial Sequence
  Description of Artificial Sequence: Synthetic epitope
QDQQAAQILD

SEQ ID NO: 35339 - protein, 10 aa, Artificial Sequence
  Description of Artificial Sequence: Synthetic epitope
QDQQTEDQPA

SEQ ID NO: 35340 - protein, 10 aa, Artificial Sequence
  Description of Artificial Sequence: Synthetic epitope
QDQRMGADQD

SEQ ID NO: 35341 - protein, 10 aa, Artificial Sequence
  Description of Artificial Sequence: Synthetic epitope
QDQSSISGSG

SEQ ID NO: 35342 - protein, 10 aa, Artificial Sequence
  Description of Artificial Sequence: Synthetic epitope
QDQSSNQTIP

SEQ ID NO: 35343 - protein, 10 aa, Artificial Sequence
  Description of Artificial Sequence: Synthetic epitope
QDQVPSLSLQ

SEQ ID NO: 35344 - protein, 10 aa, Artificial Sequence
  Description of Artificial Sequence: Synthetic epitope
QDQVTVAMTP

SEQ ID NO: 35345 - protein, 10 aa, Artificial Sequence
  Description of Artificial Sequence: Synthetic epitope
QDRAKPVTQI

SEQ ID NO: 35346 - protein, 10 aa, Artificial Sequence
  Description of Artificial Sequence: Synthetic epitope
QDRAKPVTQI

SEQ ID NO: 35347 - protein, 10 aa, Artificial Sequence
  Description of Artificial Sequence: Synthetic epitope
QDRAKSDTKS

SEQ ID NO: 35348 - protein, 10 aa, Artificial Sequence
  Description of Artificial Sequence: Synthetic epitope
QDRGDIRHIQ

SEQ ID NO: 35349 - protein, 10 aa, Artificial Sequence
  Description of Artificial Sequence: Synthetic epitope
QDRLAHKGIS

SEQ ID NO: 35350 - protein, 10 aa, Artificial Sequence
  Description of Artificial Sequence: Synthetic epitope
QDRLSALESR

SEQ ID NO: 35351 - protein, 10 aa, Artificial Sequence
  Description of Artificial Sequence: Synthetic epitope
QDRNRSKVAQ

SEQ ID NO: 35352 - protein, 10 aa, Artificial Sequence
  Description of Artificial Sequence: Synthetic epitope
QDSAAGAEGA

SEQ ID NO: 35353 - protein, 10 aa, Artificial Sequence
  Description of Artificial Sequence: Synthetic epitope
QDSAKLRQSG

SEQ ID NO: 35354 - protein, 10 aa, Artificial Sequence
  Description of Artificial Sequence: Synthetic epitope
QDSAQAGEVD

SEQ ID NO: 35355 - protein, 10 aa, Artificial Sequence
  Description of Artificial Sequence: Synthetic epitope
QDSDEYSNPA

SEQ ID NO: 35356 - protein, 10 aa, Artificial Sequence
  Description of Artificial Sequence: Synthetic epitope
QDSEDHSSDM

SEQ ID NO: 35357 - protein, 10 aa, Artificial Sequence
  Description of Artificial Sequence: Synthetic epitope
QDSEEITNIE

SEQ ID NO: 35358 - protein, 10 aa, Artificial Sequence
  Description of Artificial Sequence: Synthetic epitope
QDSEQSKPDV

SEQ ID NO: 35359 - protein, 10 aa, Artificial Sequence
  Description of Artificial Sequence: Synthetic epitope
QDSEREHTEA

SEQ ID NO: 35360 - protein, 10 aa, Artificial Sequence
  Description of Artificial Sequence: Synthetic epitope
QDSEVSEEQK

SEQ ID NO: 35361 - protein, 10 aa, Artificial Sequence
  Description of Artificial Sequence: Synthetic epitope
QDSGSKVISA

SEQ ID NO: 35362 - protein, 10 aa, Artificial Sequence
  Description of Artificial Sequence: Synthetic epitope
QDSILNQSNS

SEQ ID NO: 35363 - protein, 10 aa, Artificial Sequence
  Description of Artificial Sequence: Synthetic epitope
QDSKAWENFR

SEQ ID NO: 35364 - protein, 10 aa, Artificial Sequence
  Description of Artificial Sequence: Synthetic epitope
QDSKDSGIQT

SEQ ID NO: 35365 - protein, 10 aa, Artificial Sequence
  Description of Artificial Sequence: Synthetic epitope
QDSKDSSLLE

SEQ ID NO: 35366 - protein, 10 aa, Artificial Sequence
  Description of Artificial Sequence: Synthetic epitope
QDSKIQLPII

SEQ ID NO: 35367 - protein, 10 aa, Artificial Sequence
  Description of Artificial Sequence: Synthetic epitope
QDSKKEEQAA

SEQ ID NO: 35368 - protein, 10 aa, Artificial Sequence
  Description of Artificial Sequence: Synthetic epitope
QDSKKQLEKA

SEQ ID NO: 35369 - protein, 10 aa, Artificial Sequence
  Description of Artificial Sequence: Synthetic epitope
QDSLSGDSKT

SEQ ID NO: 35370 - protein, 10 aa, Artificial Sequence
  Description of Artificial Sequence: Synthetic epitope
QDSLSSQNQL

SEQ ID NO: 35371 - protein, 10 aa, Artificial Sequence
  Description of Artificial Sequence: Synthetic epitope
QDSLVINLNR

SEQ ID NO: 35372 - protein, 10 aa, Artificial Sequence
  Description of Artificial Sequence: Synthetic epitope
QDSNAEILAN

SEQ ID NO: 35373 - protein, 10 aa, Artificial Sequence
  Description of Artificial Sequence: Synthetic epitope
QDSNNSVDSS

SEQ ID NO: 35374 - protein, 10 aa, Artificial Sequence
  Description of Artificial Sequence: Synthetic epitope
QDSNRGVRLK

SEQ ID NO: 35375 - protein, 10 aa, Artificial Sequence
  Description of Artificial Sequence: Synthetic epitope
QDSNSDLRND

SEQ ID NO: 35376 - protein, 10 aa, Artificial Sequence
  Description of Artificial Sequence: Synthetic epitope
QDSQLVARFQ

SEQ ID NO: 35377 - protein, 10 aa, Artificial Sequence
  Description of Artificial Sequence: Synthetic epitope
QDSQSSDLKT

SEQ ID NO: 35378 - protein, 10 aa, Artificial Sequence
  Description of Artificial Sequence: Synthetic epitope
QDSQSSRSAV

SEQ ID NO: 35379 - protein, 10 aa, Artificial Sequence
  Description of Artificial Sequence: Synthetic epitope
QDSRSDEESE

SEQ ID NO: 35380 - protein, 10 aa, Artificial Sequence
  Description of Artificial Sequence: Synthetic epitope
QDSSGSEAQS

SEQ ID NO: 35381 - protein, 10 aa, Artificial Sequence
  Description of Artificial Sequence: Synthetic epitope
QDSSHSSVTT

SEQ ID NO: 35382 - protein, 10 aa, Artificial Sequence
  Description of Artificial Sequence: Synthetic epitope
QDSSITTQTD

SEQ ID NO: 35383 - protein, 10 aa, Artificial Sequence
  Description of Artificial Sequence: Synthetic epitope
QDSSLQQAFS

SEQ ID NO: 35384 - protein, 10 aa, Artificial Sequence
  Description of Artificial Sequence: Synthetic epitope
QDSSRQYNHA

SEQ ID NO: 35385 - protein, 10 aa, Artificial Sequence
  Description of Artificial Sequence: Synthetic epitope
QDSSTGLLDS

SEQ ID NO: 35386 - protein, 10 aa, Artificial Sequence
  Description of Artificial Sequence: Synthetic epitope
QDSSVFIKPE

SEQ ID NO: 35387 - protein, 10 aa, Artificial Sequence
  Description of Artificial Sequence: Synthetic epitope
QDSTTVAAFA

SEQ ID NO: 35388 - protein, 10 aa, Artificial Sequence
  Description of Artificial Sequence: Synthetic epitope
QDSTYQGERA

SEQ ID NO: 35389 - protein, 10 aa, Artificial Sequence
  Description of Artificial Sequence: Synthetic epitope
QDSVKKNSQK

SEQ ID NO: 35390 - protein, 10 aa, Artificial Sequence
  Description of Artificial Sequence: Synthetic epitope
QDSVTKLLTD

SEQ ID NO: 35391 - protein, 10 aa, Artificial Sequence
  Description of Artificial Sequence: Synthetic epitope
QDTATATTED

SEQ ID NO: 35392 - protein, 10 aa, Artificial Sequence
  Description of Artificial Sequence: Synthetic epitope
QDTELPKAEE

SEQ ID NO: 35393 - protein, 10 aa, Artificial Sequence
  Description of Artificial Sequence: Synthetic epitope
QDTEYNLSSF

SEQ ID NO: 35394 - protein, 10 aa, Artificial Sequence
  Description of Artificial Sequence: Synthetic epitope
QDTFPQVSRI

SEQ ID NO: 35395 - protein, 10 aa, Artificial Sequence
  Description of Artificial Sequence: Synthetic epitope
QDTHQASAFD

SEQ ID NO: 35396 - protein, 10 aa, Artificial Sequence
  Description of Artificial Sequence: Synthetic epitope
QDTITNLKKA

SEQ ID NO: 35397 - protein, 10 aa, Artificial Sequence
  Description of Artificial Sequence: Synthetic epitope
QDTKAADIAA

SEQ ID NO: 35398 - protein, 10 aa, Artificial Sequence
  Description of Artificial Sequence: Synthetic epitope
QDTKDEHRLH

SEQ ID NO: 35399 - protein, 10 aa, Artificial Sequence
  Description of Artificial Sequence: Synthetic epitope
QDTKESSEEP

SEQ ID NO: 35400 - protein, 10 aa, Artificial Sequence
  Description of Artificial Sequence: Synthetic epitope
QDTKSKSELK

SEQ ID NO: 35401 - protein, 10 aa, Artificial Sequence
  Description of Artificial Sequence: Synthetic epitope
QDTKTTQGNG

SEQ ID NO: 35402 - protein, 10 aa, Artificial Sequence
  Description of Artificial Sequence: Synthetic epitope
QDTLQLLVMT

SEQ ID NO: 35403 - protein, 10 aa, Artificial Sequence
  Description of Artificial Sequence: Synthetic epitope
QDTLSRTDEE

SEQ ID NO: 35404 - protein, 10 aa, Artificial Sequence
  Description of Artificial Sequence: Synthetic epitope
QDTLVPYGNR

SEQ ID NO: 35405 - protein, 10 aa, Artificial Sequence
  Description of Artificial Sequence: Synthetic epitope
QDTRSNLDIT

SEQ ID NO: 35406 - protein, 10 aa, Artificial Sequence
  Description of Artificial Sequence: Synthetic epitope
QDTSHLTSGS

SEQ ID NO: 35407 - protein, 10 aa, Artificial Sequence
  Description of Artificial Sequence: Synthetic epitope
QDTSSLADAV

SEQ ID NO: 35408 - protein, 10 aa, Artificial Sequence
  Description of Artificial Sequence: Synthetic epitope
QDTSTSFSTT

SEQ ID NO: 35409 - protein, 10 aa, Artificial Sequence
  Description of Artificial Sequence: Synthetic epitope
QDTTSESREL

SEQ ID NO: 35410 - protein, 10 aa, Artificial Sequence
  Description of Artificial Sequence: Synthetic epitope
QDTTSIQQGE

SEQ ID NO: 35411 - protein, 10 aa, Artificial Sequence
  Description of Artificial Sequence: Synthetic epitope
QDTYVSTPSE

SEQ ID NO: 35412 - protein, 10 aa, Artificial Sequence
  Description of Artificial Sequence: Synthetic epitope
QDVAKLSEMI

SEQ ID NO: 35413 - protein, 10 aa, Artificial Sequence
  Description of Artificial Sequence: Synthetic epitope
QDVATQKAET

SEQ ID NO: 35414 - protein, 10 aa, Artificial Sequence
  Description of Artificial Sequence: Synthetic epitope
QDVEVSEETV

SEQ ID NO: 35415 - protein, 10 aa, Artificial Sequence
  Description of Artificial Sequence: Synthetic epitope
QDVISTSNSS

SEQ ID NO: 35416 - protein, 10 aa, Artificial Sequence
  Description of Artificial Sequence: Synthetic epitope
QDVKPEMAML

SEQ ID NO: 35417 - protein, 10 aa, Artificial Sequence
  Description of Artificial Sequence: Synthetic epitope
QDVKSSKSTI

SEQ ID NO: 35418 - protein, 10 aa, Artificial Sequence
  Description of Artificial Sequence: Synthetic epitope
QDVKSTKLIT

SEQ ID NO: 35419 - protein, 10 aa, Artificial Sequence
  Description of Artificial Sequence: Synthetic epitope
QDVLIFKLYQ

SEQ ID NO: 35420 - protein, 10 aa, Artificial Sequence
  Description of Artificial Sequence: Synthetic epitope
QDVLKKSYSK

SEQ ID NO: 35421 - protein, 10 aa, Artificial Sequence
  Description of Artificial Sequence: Synthetic epitope
QDVQRIMVAN

SEQ ID NO: 35422 - protein, 10 aa, Artificial Sequence
  Description of Artificial Sequence: Synthetic epitope
QDVQSEALQK

SEQ ID NO: 35423 - protein, 10 aa, Artificial Sequence
  Description of Artificial Sequence: Synthetic epitope
QDVSASTKSL

SEQ ID NO: 35424 - protein, 10 aa, Artificial Sequence
  Description of Artificial Sequence: Synthetic epitope
QDVSLLASDS

SEQ ID NO: 35425 - protein, 10 aa, Artificial Sequence
  Description of Artificial Sequence: Synthetic epitope
QDVTVQAGVT

SEQ ID NO: 35426 - protein, 10 aa, Artificial Sequence
  Description of Artificial Sequence: Synthetic epitope
QDWLASVTER

SEQ ID NO: 35427 - protein, 10 aa, Artificial Sequence
  Description of Artificial Sequence: Synthetic epitope
QDWSLKSEHW

SEQ ID NO: 35428 - protein, 10 aa, Artificial Sequence
  Description of Artificial Sequence: Synthetic epitope
QDWVEAADIF

SEQ ID NO: 35429 - protein, 10 aa, Artificial Sequence
  Description of Artificial Sequence: Synthetic epitope
QDYASSEQLA

SEQ ID NO: 35430 - protein, 10 aa, Artificial Sequence
  Description of Artificial Sequence: Synthetic epitope
QDYLSAMVEP

SEQ ID NO: 35431 - protein, 10 aa, Artificial Sequence
  Description of Artificial Sequence: Synthetic epitope
QDYVIEKLEQ

SEQ ID NO: 35432 - protein, 10 aa, Artificial Sequence
  Description of Artificial Sequence: Synthetic epitope
QEAAEERESA

SEQ ID NO: 35433 - protein, 10 aa, Artificial Sequence
  Description of Artificial Sequence: Synthetic epitope
QEAAELEAVE

SEQ ID NO: 35434 - protein, 10 aa, Artificial Sequence
  Description of Artificial Sequence: Synthetic epitope
QEAAKTTKVQ

SEQ ID NO: 35435 - protein, 10 aa, Artificial Sequence
  Description of Artificial Sequence: Synthetic epitope
QEAALAAGYS

SEQ ID NO: 35436 - protein, 10 aa, Artificial Sequence
  Description of Artificial Sequence: Synthetic epitope
QEAALGSDDS

SEQ ID NO: 35437 - protein, 10 aa, Artificial Sequence
  Description of Artificial Sequence: Synthetic epitope
QEAALLIEYD

SEQ ID NO: 35438 - protein, 10 aa, Artificial Sequence
  Description of Artificial Sequence: Synthetic epitope
QEAAMKLETE

SEQ ID NO: 35439 - protein, 10 aa, Artificial Sequence
  Description of Artificial Sequence: Synthetic epitope
QEAARARELE

SEQ ID NO: 35440 - protein, 10 aa, Artificial Sequence
  Description of Artificial Sequence: Synthetic epitope
QEAATIKKHE

SEQ ID NO: 35441 - protein, 10 aa, Artificial Sequence
  Description of Artificial Sequence: Synthetic epitope
QEAAVKQTQD

SEQ ID NO: 35442 - protein, 10 aa, Artificial Sequence
  Description of Artificial Sequence: Synthetic epitope
QEAEEAEKKQ

SEQ ID NO: 35443 - protein, 10 aa, Artificial Sequence
  Description of Artificial Sequence: Synthetic epitope
QEAEEQMEQL

SEQ ID NO: 35444 - protein, 10 aa, Artificial Sequence
  Description of Artificial Sequence: Synthetic epitope
QEAEINARKA

SEQ ID NO: 35445 - protein, 10 aa, Artificial Sequence
  Description of Artificial Sequence: Synthetic epitope
QEAELMSRED

SEQ ID NO: 35446 - protein, 10 aa, Artificial Sequence
  Description of Artificial Sequence: Synthetic epitope
QEAEQIQPEE

SEQ ID NO: 35447 - protein, 10 aa, Artificial Sequence
  Description of Artificial Sequence: Synthetic epitope
QEAESKVSMA

SEQ ID NO: 35448 - protein, 10 aa, Artificial Sequence
  Description of Artificial Sequence: Synthetic epitope
QEAEVGSDGE

SEQ ID NO: 35449 - protein, 10 aa, Artificial Sequence
  Description of Artificial Sequence: Synthetic epitope
QEAEVTAVTI

SEQ ID NO: 35450 - protein, 10 aa, Artificial Sequence
  Description of Artificial Sequence: Synthetic epitope
QEAEVVIYET

SEQ ID NO: 35451 - protein, 10 aa, Artificial Sequence
  Description of Artificial Sequence: Synthetic epitope
QEAGITEERH

SEQ ID NO: 35452 - protein, 10 aa, Artificial Sequence
  Description of Artificial Sequence: Synthetic epitope
QEAIAAVGEG

SEQ ID NO: 35453 - protein, 10 aa, Artificial Sequence
  Description of Artificial Sequence: Synthetic epitope
QEAIAGVLQR

SEQ ID NO: 35454 - protein, 10 aa, Artificial Sequence
  Description of Artificial Sequence: Synthetic epitope
QEAINSLGGS

SEQ ID NO: 35455 - protein, 10 aa, Artificial Sequence
  Description of Artificial Sequence: Synthetic epitope
QEAISKIKWE

SEQ ID NO: 35456 - protein, 10 aa, Artificial Sequence
  Description of Artificial Sequence: Synthetic epitope
QEAKENSAGG

SEQ ID NO: 35457 - protein, 10 aa, Artificial Sequence
  Description of Artificial Sequence: Synthetic epitope
QEAKLKAKGL

SEQ ID NO: 35458 - protein, 10 aa, Artificial Sequence
  Description of Artificial Sequence: Synthetic epitope
QEAKQKVEKE

SEQ ID NO: 35459 - protein, 10 aa, Artificial Sequence
  Description of Artificial Sequence: Synthetic epitope
QEAKTEQTKT

SEQ ID NO: 35460 - protein, 10 aa, Artificial Sequence
  Description of Artificial Sequence: Synthetic epitope
QEAKTMVEED

SEQ ID NO: 35461 - protein, 10 aa, Artificial Sequence
  Description of Artificial Sequence: Synthetic epitope
QEALAGQLDS

SEQ ID NO: 35462 - protein, 10 aa, Artificial Sequence
  Description of Artificial Sequence: Synthetic epitope
QEALKVRKDD

SEQ ID NO: 35463 - protein, 10 aa, Artificial Sequence
  Description of Artificial Sequence: Synthetic epitope
QEALLQLSQV

SEQ ID NO: 35464 - protein, 10 aa, Artificial Sequence
  Description of Artificial Sequence: Synthetic epitope
QEALNAKKEI

SEQ ID NO: 35465 - protein, 10 aa, Artificial Sequence
  Description of Artificial Sequence: Synthetic epitope
QEALPENASQ

SEQ ID NO: 35466 - protein, 10 aa, Artificial Sequence
  Description of Artificial Sequence: Synthetic epitope
QEALQVVYER

SEQ ID NO: 35467 - protein, 10 aa, Artificial Sequence
  Description of Artificial Sequence: Synthetic epitope
QEALSRHSAA

SEQ ID NO: 35468 - protein, 10 aa, Artificial Sequence
  Description of Artificial Sequence: Synthetic epitope
QEALTSAGVR

SEQ ID NO: 35469 - protein, 10 aa, Artificial Sequence
  Description of Artificial Sequence: Synthetic epitope
QEANALEQRA

SEQ ID NO: 35470 - protein, 10 aa, Artificial Sequence
  Description of Artificial Sequence: Synthetic epitope
QEANKAARKE

SEQ ID NO: 35471 - protein, 10 aa, Artificial Sequence
  Description of Artificial Sequence: Synthetic epitope
QEAPLALTTK

SEQ ID NO: 35472 - protein, 10 aa, Artificial Sequence
  Description of Artificial Sequence: Synthetic epitope
QEAPTEEASS

SEQ ID NO: 35473 - protein, 10 aa, Artificial Sequence
  Description of Artificial Sequence: Synthetic epitope
QEAQKAEPSS

SEQ ID NO: 35474 - protein, 10 aa, Artificial Sequence
  Description of Artificial Sequence: Synthetic epitope
QEAQLEPFKE

SEQ ID NO: 35475 - protein, 10 aa, Artificial Sequence
  Description of Artificial Sequence: Synthetic epitope
QEAQNERLST

SEQ ID NO: 35476 - protein, 10 aa, Artificial Sequence
  Description of Artificial Sequence: Synthetic epitope
QEAQQALVSQ

SEQ ID NO: 35477 - protein, 10 aa, Artificial Sequence
  Description of Artificial Sequence: Synthetic epitope
QEAQWKALNS

SEQ ID NO: 35478 - protein, 10 aa, Artificial Sequence
  Description of Artificial Sequence: Synthetic epitope
QEAQYRLVTE

SEQ ID NO: 35479 - protein, 10 aa, Artificial Sequence
  Description of Artificial Sequence: Synthetic epitope
QEARASQEAS

SEQ ID NO: 35480 - protein, 10 aa, Artificial Sequence
  Description of Artificial Sequence: Synthetic epitope
QEARLRQQWE

SEQ ID NO: 35481 - protein, 10 aa, Artificial Sequence
  Description of Artificial Sequence: Synthetic epitope
QEARSSQAPS

SEQ ID NO: 35482 - protein, 10 aa, Artificial Sequence
  Description of Artificial Sequence: Synthetic epitope
QEASEVLAEP

SEQ ID NO: 35483 - protein, 10 aa, Artificial Sequence
  Description of Artificial Sequence: Synthetic epitope
QEASLSVTST

SEQ ID NO: 35484 - protein, 10 aa, Artificial Sequence
  Description of Artificial Sequence: Synthetic epitope
QEASRVITSQ

SEQ ID NO: 35485 - protein, 10 aa, Artificial Sequence
  Description of Artificial Sequence: Synthetic epitope
QEASTQLEDS

SEQ ID NO: 35486 - protein, 10 aa, Artificial Sequence
  Description of Artificial Sequence: Synthetic epitope
QEASVLQKKG

SEQ ID NO: 35487 - protein, 10 aa, Artificial Sequence
  Description of Artificial Sequence: Synthetic epitope
QEASVPKGRI

SEQ ID NO: 35488 - protein, 10 aa, Artificial Sequence
  Description of Artificial Sequence: Synthetic epitope
QEATKLLEDK

SEQ ID NO: 35489 - protein, 10 aa, Artificial Sequence
  Description of Artificial Sequence: Synthetic epitope
QEATYKEVSK

SEQ ID NO: 35490 - protein, 10 aa, Artificial Sequence
  Description of Artificial Sequence: Synthetic epitope
QEAVGKKESE

SEQ ID NO: 35491 - protein, 10 aa, Artificial Sequence
  Description of Artificial Sequence: Synthetic epitope
QEAVSALLRP

SEQ ID NO: 35492 - protein, 10 aa, Artificial Sequence
  Description of Artificial Sequence: Synthetic epitope
QEDDSFEKEN

SEQ ID NO: 35493 - protein, 10 aa, Artificial Sequence
  Description of Artificial Sequence: Synthetic epitope
QEDEITVLKA

SEQ ID NO: 35494 - protein, 10 aa, Artificial Sequence
  Description of Artificial Sequence: Synthetic epitope
QEDEYIQSHN

SEQ ID NO: 35495 - protein, 10 aa, Artificial Sequence
  Description of Artificial Sequence: Synthetic epitope
QEDFQKIRMA

SEQ ID NO: 35496 - protein, 10 aa, Artificial Sequence
  Description of Artificial Sequence: Synthetic epitope
QEDISTQLSD

SEQ ID NO: 35497 - protein, 10 aa, Artificial Sequence
  Description of Artificial Sequence: Synthetic epitope
QEDKKPKGKS

SEQ ID NO: 35498 - protein, 10 aa, Artificial Sequence
  Description of Artificial Sequence: Synthetic epitope
QEDKNWETNI

SEQ ID NO: 35499 - protein, 10 aa, Artificial Sequence
  Description of Artificial Sequence: Synthetic epitope
QEDLSMTQKD

SEQ ID NO: 35500 - protein, 10 aa, Artificial Sequence
  Description of Artificial Sequence: Synthetic epitope
QEDLSSASPL

SEQ ID NO: 35501 - protein, 10 aa, Artificial Sequence
  Description of Artificial Sequence: Synthetic epitope
QEDMFAVQPP

SEQ ID NO: 35502 - protein, 10 aa, Artificial Sequence
  Description of Artificial Sequence: Synthetic epitope
QEDMVQVLEL

SEQ ID NO: 35503 - protein, 10 aa, Artificial Sequence
  Description of Artificial Sequence: Synthetic epitope
QEDQDNQSEY

SEQ ID NO: 35504 - protein, 10 aa, Artificial Sequence
  Description of Artificial Sequence: Synthetic epitope
QEDSAATSES

SEQ ID NO: 35505 - protein, 10 aa, Artificial Sequence
  Description of Artificial Sequence: Synthetic epitope
QEDSAIMFDQ

SEQ ID NO: 35506 - protein, 10 aa, Artificial Sequence
  Description of Artificial Sequence: Synthetic epitope
QEDSMASTVL

SEQ ID NO: 35507 - protein, 10 aa, Artificial Sequence
  Description of Artificial Sequence: Synthetic epitope
QEDSRSTLSR

SEQ ID NO: 35508 - protein, 10 aa, Artificial Sequence
  Description of Artificial Sequence: Synthetic epitope
QEDSTLYVSF

SEQ ID NO: 35509 - protein, 10 aa, Artificial Sequence
  Description of Artificial Sequence: Synthetic epitope
QEDSTRDEGN

SEQ ID NO: 35510 - protein, 10 aa, Artificial Sequence
  Description of Artificial Sequence: Synthetic epitope
QEDTTKSSLP

SEQ ID NO: 35511 - protein, 10 aa, Artificial Sequence
  Description of Artificial Sequence: Synthetic epitope
QEDTTSLRTL

SEQ ID NO: 35512 - protein, 10 aa, Artificial Sequence
  Description of Artificial Sequence: Synthetic epitope
QEDVDAMQNE

SEQ ID NO: 35513 - protein, 10 aa, Artificial Sequence
  Description of Artificial Sequence: Synthetic epitope
QEDVVPLDKL

SEQ ID NO: 35514 - protein, 10 aa, Artificial Sequence
  Description of Artificial Sequence: Synthetic epitope
QEDYASYIMN

SEQ ID NO: 35515 - protein, 10 aa, Artificial Sequence
  Description of Artificial Sequence: Synthetic epitope
QEEAEIKSGL

SEQ ID NO: 35516 - protein, 10 aa, Artificial Sequence
  Description of Artificial Sequence: Synthetic epitope
QEEAQFETKK

SEQ ID NO: 35517 - protein, 10 aa, Artificial Sequence
  Description of Artificial Sequence: Synthetic epitope
QEEDEAYQEL

SEQ ID NO: 35518 - protein, 10 aa, Artificial Sequence
  Description of Artificial Sequence: Synthetic epitope
QEEDKDTAED

SEQ ID NO: 35519 - protein, 10 aa, Artificial Sequence
  Description of Artificial Sequence: Synthetic epitope
QEEDSVSLQS

SEQ ID NO: 35520 - protein, 10 aa, Artificial Sequence
  Description of Artificial Sequence: Synthetic epitope
QEEDTKKPKD

SEQ ID NO: 35521 - protein, 10 aa, Artificial Sequence
  Description of Artificial Sequence: Synthetic epitope
QEEGAAEVKR

SEQ ID NO: 35522 - protein, 10 aa, Artificial Sequence
  Description of Artificial Sequence: Synthetic epitope
QEEGATIQWM

SEQ ID NO: 35523 - protein, 10 aa, Artificial Sequence
  Description of Artificial Sequence: Synthetic epitope
QEEGKQKTKQ

SEQ ID NO: 35524 - protein, 10 aa, Artificial Sequence
  Description of Artificial Sequence: Synthetic epitope
QEEHAANIGS

SEQ ID NO: 35525 - protein, 10 aa, Artificial Sequence
  Description of Artificial Sequence: Synthetic epitope
QEEHAEEYDL

SEQ ID NO: 35526 - protein, 10 aa, Artificial Sequence
  Description of Artificial Sequence: Synthetic epitope
QEEHFDASHV

SEQ ID NO: 35527 - protein, 10 aa, Artificial Sequence
  Description of Artificial Sequence: Synthetic epitope
QEEIAKRQSQ

SEQ ID NO: 35528 - protein, 10 aa, Artificial Sequence
  Description of Artificial Sequence: Synthetic epitope
QEEKESLSLQ

SEQ ID NO: 35529 - protein, 10 aa, Artificial Sequence
  Description of Artificial Sequence: Synthetic epitope
QEEKLSLQQV

SEQ ID NO: 35530 - protein, 10 aa, Artificial Sequence
  Description of Artificial Sequence: Synthetic epitope
QEEKSELAAE

SEQ ID NO: 35531 - protein, 10 aa, Artificial Sequence
  Description of Artificial Sequence: Synthetic epitope
QEEKSLNLAS

SEQ ID NO: 35532 - protein, 10 aa, Artificial Sequence
  Description of Artificial Sequence: Synthetic epitope
QEEKTSTATS

SEQ ID NO: 35533 - protein, 10 aa, Artificial Sequence
  Description of Artificial Sequence: Synthetic epitope
QEELAASFSS

SEQ ID NO: 35534 - protein, 10 aa, Artificial Sequence
  Description of Artificial Sequence: Synthetic epitope
QEELAKLSEK

SEQ ID NO: 35535 - protein, 10 aa, Artificial Sequence
  Description of Artificial Sequence: Synthetic epitope
QEELEAKQAK

SEQ ID NO: 35536 - protein, 10 aa, Artificial Sequence
  Description of Artificial Sequence: Synthetic epitope
QEELKAARLQ

SEQ ID NO: 35537 - protein, 10 aa, Artificial Sequence
  Description of Artificial Sequence: Synthetic epitope
QEELKSARLQ

SEQ ID NO: 35538 - protein, 10 aa, Artificial Sequence
  Description of Artificial Sequence: Synthetic epitope
QEELLSLVQE

SEQ ID NO: 35539 - protein, 10 aa, Artificial Sequence
  Description of Artificial Sequence: Synthetic epitope
QEELLVKETN

SEQ ID NO: 35540 - protein, 10 aa, Artificial Sequence
  Description of Artificial Sequence: Synthetic epitope
QEELTELKDE

SEQ ID NO: 35541 - protein, 10 aa, Artificial Sequence
  Description of Artificial Sequence: Synthetic epitope
QEEMAALKEN

SEQ ID NO: 35542 - protein, 10 aa, Artificial Sequence
  Description of Artificial Sequence: Synthetic epitope
QEEMLQREEA

SEQ ID NO: 35543 - protein, 10 aa, Artificial Sequence
  Description of Artificial Sequence: Synthetic epitope
QEENSFSENQ

SEQ ID NO: 35544 - protein, 10 aa, Artificial Sequence
  Description of Artificial Sequence: Synthetic epitope
QEEQAEIYKS

SEQ ID NO: 35545 - protein, 10 aa, Artificial Sequence
  Description of Artificial Sequence: Synthetic epitope
QEEQLASLDA

SEQ ID NO: 35546 - protein, 10 aa, Artificial Sequence
  Description of Artificial Sequence: Synthetic epitope
QEEQSMTPPG

SEQ ID NO: 35547 - protein, 10 aa, Artificial Sequence
  Description of Artificial Sequence: Synthetic epitope
QEERDDSLRF

SEQ ID NO: 35548 - protein, 10 aa, Artificial Sequence
  Description of Artificial Sequence: Synthetic epitope
QEERKIVIKN

SEQ ID NO: 35549 - protein, 10 aa, Artificial Sequence
  Description of Artificial Sequence: Synthetic epitope
QEERSLLAEQ

SEQ ID NO: 35550 - protein, 10 aa, Artificial Sequence
  Description of Artificial Sequence: Synthetic epitope
QEESAFISEA

SEQ ID NO: 35551 - protein, 10 aa, Artificial Sequence
  Description of Artificial Sequence: Synthetic epitope
QEESKETSMN

SEQ ID NO: 35552 - protein, 10 aa, Artificial Sequence
  Description of Artificial Sequence: Synthetic epitope
QEESLMPSQV

SEQ ID NO: 35553 - protein, 10 aa, Artificial Sequence
  Description of Artificial Sequence: Synthetic epitope
QEESLQLNSI

SEQ ID NO: 35554 - protein, 10 aa, Artificial Sequence
  Description of Artificial Sequence: Synthetic epitope
QEESQAASEQ

SEQ ID NO: 35555 - protein, 10 aa, Artificial Sequence
  Description of Artificial Sequence: Synthetic epitope
QEESSAQLSN

SEQ ID NO: 35556 - protein, 10 aa, Artificial Sequence
  Description of Artificial Sequence: Synthetic epitope
QEESSEVPER

SEQ ID NO: 35557 - protein, 10 aa, Artificial Sequence
  Description of Artificial Sequence: Synthetic epitope
QEESTNKSTT

SEQ ID NO: 35558 - protein, 10 aa, Artificial Sequence
  Description of Artificial Sequence: Synthetic epitope
QEESVQKHHQ

SEQ ID NO: 35559 - protein, 10 aa, Artificial Sequence
  Description of Artificial Sequence: Synthetic epitope
QEETRTKLQK

SEQ ID NO: 35560 - protein, 10 aa, Artificial Sequence
  Description of Artificial Sequence: Synthetic epitope
QEETRVAQKE

SEQ ID NO: 35561 - protein, 10 aa, Artificial Sequence
  Description of Artificial Sequence: Synthetic epitope
QEETTLVDDP

SEQ ID NO: 35562 - protein, 10 aa, Artificial Sequence
  Description of Artificial Sequence: Synthetic epitope
QEETTVEPQE

SEQ ID NO: 35563 - protein, 10 aa, Artificial Sequence
  Description of Artificial Sequence: Synthetic epitope
QEEVRRAGLV

SEQ ID NO: 35564 - protein, 10 aa, Artificial Sequence
  Description of Artificial Sequence: Synthetic epitope
QEEVSTQGTL

SEQ ID NO: 35565 - protein, 10 aa, Artificial Sequence
  Description of Artificial Sequence: Synthetic epitope
QEEVTKMNLL

SEQ ID NO: 35566 - protein, 10 aa, Artificial Sequence
  Description of Artificial Sequence: Synthetic epitope
QEFAAQTKRL

SEQ ID NO: 35567 - protein, 10 aa, Artificial Sequence
  Description of Artificial Sequence: Synthetic epitope
QEFADTLLPD

SEQ ID NO: 35568 - protein, 10 aa, Artificial Sequence
  Description of Artificial Sequence: Synthetic epitope
QEFKKLKIRR

SEQ ID NO: 35569 - protein, 10 aa, Artificial Sequence
  Description of Artificial Sequence: Synthetic epitope
QEFMTFTSQL

SEQ ID NO: 35570 - protein, 10 aa, Artificial Sequence
  Description of Artificial Sequence: Synthetic epitope
QEFMVKSEEL

SEQ ID NO: 35571 - protein, 10 aa, Artificial Sequence
  Description of Artificial Sequence: Synthetic epitope
QEFRRWRDTG

SEQ ID NO: 35572 - protein, 10 aa, Artificial Sequence
  Description of Artificial Sequence: Synthetic epitope
QEFSKRIKQD

SEQ ID NO: 35573 - protein, 10 aa, Artificial Sequence
  Description of Artificial Sequence: Synthetic epitope
QEFTVKSKGA

SEQ ID NO: 35574 - protein, 10 aa, Artificial Sequence
  Description of Artificial Sequence: Synthetic epitope
QEFVESQSTD

SEQ ID NO: 35575 - protein, 10 aa, Artificial Sequence
  Description of Artificial Sequence: Synthetic epitope
QEGAILANNS

SEQ ID NO: 35576 - protein, 10 aa, Artificial Sequence
  Description of Artificial Sequence: Synthetic epitope
QEGASAGAPS

SEQ ID NO: 35577 - protein, 10 aa, Artificial Sequence
  Description of Artificial Sequence: Synthetic epitope
QEGASFAESL

SEQ ID NO: 35578 - protein, 10 aa, Artificial Sequence
  Description of Artificial Sequence: Synthetic epitope
QEGDGKSAIG

SEQ ID NO: 35579 - protein, 10 aa, Artificial Sequence
  Description of Artificial Sequence: Synthetic epitope
QEGDVVASNA

SEQ ID NO: 35580 - protein, 10 aa, Artificial Sequence
  Description of Artificial Sequence: Synthetic epitope
QEGEATTRKE

SEQ ID NO: 35581 - protein, 10 aa, Artificial Sequence
  Description of Artificial Sequence: Synthetic epitope
QEGEEKKQTS

SEQ ID NO: 35582 - protein, 10 aa, Artificial Sequence
  Description of Artificial Sequence: Synthetic epitope
QEGEMKDKAE

SEQ ID NO: 35583 - protein, 10 aa, Artificial Sequence
  Description of Artificial Sequence: Synthetic epitope
QEGHSAFATM

SEQ ID NO: 35584 - protein, 10 aa, Artificial Sequence
  Description of Artificial Sequence: Synthetic epitope
QEGIKVLETL

SEQ ID NO: 35585 - protein, 10 aa, Artificial Sequence
  Description of Artificial Sequence: Synthetic epitope
QEGIQQKAEP

SEQ ID NO: 35586 - protein, 10 aa, Artificial Sequence
  Description of Artificial Sequence: Synthetic epitope
QEGKSTEQGN

SEQ ID NO: 35587 - protein, 10 aa, Artificial Sequence
  Description of Artificial Sequence: Synthetic epitope
QEGKYPVRND

SEQ ID NO: 35588 - protein, 10 aa, Artificial Sequence
  Description of Artificial Sequence: Synthetic epitope
QEGLASKFTS

SEQ ID NO: 35589 - protein, 10 aa, Artificial Sequence
  Description of Artificial Sequence: Synthetic epitope
QEGMREMSHS

SEQ ID NO: 35590 - protein, 10 aa, Artificial Sequence
  Description of Artificial Sequence: Synthetic epitope
QEGNVESETL

SEQ ID NO: 35591 - protein, 10 aa, Artificial Sequence
  Description of Artificial Sequence: Synthetic epitope
QEGPVKSPAE

SEQ ID NO: 35592 - protein, 10 aa, Artificial Sequence
  Description of Artificial Sequence: Synthetic epitope
QEGQTQRQPG

SEQ ID NO: 35593 - protein, 10 aa, Artificial Sequence
  Description of Artificial Sequence: Synthetic epitope
QEGRIPSTED

SEQ ID NO: 35594 - protein, 10 aa, Artificial Sequence
  Description of Artificial Sequence: Synthetic epitope
QEGRLQRKQK

SEQ ID NO: 35595 - protein, 10 aa, Artificial Sequence
  Description of Artificial Sequence: Synthetic epitope
QEGTKLVEES

SEQ ID NO: 35596 - protein, 10 aa, Artificial Sequence
  Description of Artificial Sequence: Synthetic epitope
QEGTVFEVRE

SEQ ID NO: 35597 - protein, 10 aa, Artificial Sequence
  Description of Artificial Sequence: Synthetic epitope
QEGVIETVTS

SEQ ID NO: 35598 - protein, 10 aa, Artificial Sequence
  Description of Artificial Sequence: Synthetic epitope
QEHALSASKA

SEQ ID NO: 35599 - protein, 10 aa, Artificial Sequence
  Description of Artificial Sequence: Synthetic epitope
QEHIETAYRI

SEQ ID NO: 35600 - protein, 10 aa, Artificial Sequence
  Description of Artificial Sequence: Synthetic epitope
QEHISTSIDF

SEQ ID NO: 35601 - protein, 10 aa, Artificial Sequence
  Description of Artificial Sequence: Synthetic epitope
QEHKASMHPV

SEQ ID NO: 35602 - protein, 10 aa, Artificial Sequence
  Description of Artificial Sequence: Synthetic epitope
QEHLIKAKAF

SEQ ID NO: 35603 - protein, 10 aa, Artificial Sequence
  Description of Artificial Sequence: Synthetic epitope
QEHPAIYDSI

SEQ ID NO: 35604 - protein, 10 aa, Artificial Sequence
  Description of Artificial Sequence: Synthetic epitope
QEHSAQHSAA

SEQ ID NO: 35605 - protein, 10 aa, Artificial Sequence
  Description of Artificial Sequence: Synthetic epitope
QEHSFTRTID

SEQ ID NO: 35606 - protein, 10 aa, Artificial Sequence
  Description of Artificial Sequence: Synthetic epitope
QEHVTATHKT

SEQ ID NO: 35607 - protein, 10 aa, Artificial Sequence
  Description of Artificial Sequence: Synthetic epitope
QEHYRFAGKE

SEQ ID NO: 35608 - protein, 10 aa, Artificial Sequence
  Description of Artificial Sequence: Synthetic epitope
QEHYTLSENS

SEQ ID NO: 35609 - protein, 10 aa, Artificial Sequence
  Description of Artificial Sequence: Synthetic epitope
QEIAEMRIPA

SEQ ID NO: 35610 - protein, 10 aa, Artificial Sequence
  Description of Artificial Sequence: Synthetic epitope
QEIAEQKRRE

SEQ ID NO: 35611 - protein, 10 aa, Artificial Sequence
  Description of Artificial Sequence: Synthetic epitope
QEIDAEEVNS

SEQ ID NO: 35612 - protein, 10 aa, Artificial Sequence
  Description of Artificial Sequence: Synthetic epitope
QEIDRSNEFK

SEQ ID NO: 35613 - protein, 10 aa, Artificial Sequence
  Description of Artificial Sequence: Synthetic epitope
QEIEEVKALI

SEQ ID NO: 35614 - protein, 10 aa, Artificial Sequence
  Description of Artificial Sequence: Synthetic epitope
QEIERYLFET

SEQ ID NO: 35615 - protein, 10 aa, Artificial Sequence
  Description of Artificial Sequence: Synthetic epitope
QEIETIKIIE

SEQ ID NO: 35616 - protein, 10 aa, Artificial Sequence
  Description of Artificial Sequence: Synthetic epitope
QEIIERDSVQ

SEQ ID NO: 35617 - protein, 10 aa, Artificial Sequence
  Description of Artificial Sequence: Synthetic epitope
QEIKEQEYQA

SEQ ID NO: 35618 - protein, 10 aa, Artificial Sequence
  Description of Artificial Sequence: Synthetic epitope
QEIKISLEEQ

SEQ ID NO: 35619 - protein, 10 aa, Artificial Sequence
  Description of Artificial Sequence: Synthetic epitope
QEIKNAKSEA

SEQ ID NO: 35620 - protein, 10 aa, Artificial Sequence
  Description of Artificial Sequence: Synthetic epitope
QEIKNTVKDS

SEQ ID NO: 35621 - protein, 10 aa, Artificial Sequence
  Description of Artificial Sequence: Synthetic epitope
QEIKRAIQAK

SEQ ID NO: 35622 - protein, 10 aa, Artificial Sequence
  Description of Artificial Sequence: Synthetic epitope
QEIKSSLDNH

SEQ ID NO: 35623 - protein, 10 aa, Artificial Sequence
  Description of Artificial Sequence: Synthetic epitope
QEIKSSLRKL

SEQ ID NO: 35624 - protein, 10 aa, Artificial Sequence
  Description of Artificial Sequence: Synthetic epitope
QEILDNVQVR

SEQ ID NO: 35625 - protein, 10 aa, Artificial Sequence
  Description of Artificial Sequence: Synthetic epitope
QEILNTSREK

SEQ ID NO: 35626 - protein, 10 aa, Artificial Sequence
  Description of Artificial Sequence: Synthetic epitope
QEILTALDRD

SEQ ID NO: 35627 - protein, 10 aa, Artificial Sequence
  Description of Artificial Sequence: Synthetic epitope
QEIMEVAKER

SEQ ID NO: 35628 - protein, 10 aa, Artificial Sequence
  Description of Artificial Sequence: Synthetic epitope
QEINIATRTT

SEQ ID NO: 35629 - protein, 10 aa, Artificial Sequence
  Description of Artificial Sequence: Synthetic epitope
QEIPADTLGQ

SEQ ID NO: 35630 - protein, 10 aa, Artificial Sequence
  Description of Artificial Sequence: Synthetic epitope
QEIQETEQAI

SEQ ID NO: 35631 - protein, 10 aa, Artificial Sequence
  Description of Artificial Sequence: Synthetic epitope
QEISFDFGPN

SEQ ID NO: 35632 - protein, 10 aa, Artificial Sequence
  Description of Artificial Sequence: Synthetic epitope
QEISLEKMPS

SEQ ID NO: 35633 - protein, 10 aa, Artificial Sequence
  Description of Artificial Sequence: Synthetic epitope
QEISQAMEQE

SEQ ID NO: 35634 - protein, 10 aa, Artificial Sequence
  Description of Artificial Sequence: Synthetic epitope
QEITSFEINL

SEQ ID NO: 35635 - protein, 10 aa, Artificial Sequence
  Description of Artificial Sequence: Synthetic epitope
QEITSQPKRQ

SEQ ID NO: 35636 - protein, 10 aa, Artificial Sequence
  Description of Artificial Sequence: Synthetic epitope
QEITVQQAAE

SEQ ID NO: 35637 - protein, 10 aa, Artificial Sequence
  Description of Artificial Sequence: Synthetic epitope
QEIVALREQN

SEQ ID NO: 35638 - protein, 10 aa, Artificial Sequence
  Description of Artificial Sequence: Synthetic epitope
QEIYVNKKRL

SEQ ID NO: 35639 - protein, 10 aa, Artificial Sequence
  Description of Artificial Sequence: Synthetic epitope
QEKAIKRREA

SEQ ID NO: 35640 - protein, 10 aa, Artificial Sequence
  Description of Artificial Sequence: Synthetic epitope
QEKAIKRREA

SEQ ID NO: 35641 - protein, 10 aa, Artificial Sequence
  Description of Artificial Sequence: Synthetic epitope
QEKAMSIREQ

SEQ ID NO: 35642 - protein, 10 aa, Artificial Sequence
  Description of Artificial Sequence: Synthetic epitope
QEKAQDYQAE

SEQ ID NO: 35643 - protein, 10 aa, Artificial Sequence
  Description of Artificial Sequence: Synthetic epitope
QEKASIAGHM

SEQ ID NO: 35644 - protein, 10 aa, Artificial Sequence
  Description of Artificial Sequence: Synthetic epitope
QEKAVMREDL

SEQ ID NO: 35645 - protein, 10 aa, Artificial Sequence
  Description of Artificial Sequence: Synthetic epitope
QEKDDKEEKK

SEQ ID NO: 35646 - protein, 10 aa, Artificial Sequence
  Description of Artificial Sequence: Synthetic epitope
QEKDENKWTH

SEQ ID NO: 35647 - protein, 10 aa, Artificial Sequence
  Description of Artificial Sequence: Synthetic epitope
QEKDTQTKLE

SEQ ID NO: 35648 - protein, 10 aa, Artificial Sequence
  Description of Artificial Sequence: Synthetic epitope
QEKERATEKR

SEQ ID NO: 35649 - protein, 10 aa, Artificial Sequence
  Description of Artificial Sequence: Synthetic epitope
QEKFSKTMIQ

SEQ ID NO: 35650 - protein, 10 aa, Artificial Sequence
  Description of Artificial Sequence: Synthetic epitope
QEKGHDASQI

SEQ ID NO: 35651 - protein, 10 aa, Artificial Sequence
  Description of Artificial Sequence: Synthetic epitope
QEKGKLSAEE

SEQ ID NO: 35652 - protein, 10 aa, Artificial Sequence
  Description of Artificial Sequence: Synthetic epitope
QEKGKQQDTV

SEQ ID NO: 35653 - protein, 10 aa, Artificial Sequence
  Description of Artificial Sequence: Synthetic epitope
QEKGQKEVLL

SEQ ID NO: 35654 - protein, 10 aa, Artificial Sequence
  Description of Artificial Sequence: Synthetic epitope
QEKGVTTSLQ

SEQ ID NO: 35655 - protein, 10 aa, Artificial Sequence
  Description of Artificial Sequence: Synthetic epitope
QEKIEVVRKL

SEQ ID NO: 35656 - protein, 10 aa, Artificial Sequence
  Description of Artificial Sequence: Synthetic epitope
QEKIRQRQSI

SEQ ID NO: 35657 - protein, 10 aa, Artificial Sequence
  Description of Artificial Sequence: Synthetic epitope
QEKISSATNS

SEQ ID NO: 35658 - protein, 10 aa, Artificial Sequence
  Description of Artificial Sequence: Synthetic epitope
QEKKAKEAAG

SEQ ID NO: 35659 - protein, 10 aa, Artificial Sequence
  Description of Artificial Sequence: Synthetic epitope
QEKKGGRSSA

SEQ ID NO: 35660 - protein, 10 aa, Artificial Sequence
  Description of Artificial Sequence: Synthetic epitope
QEKKIQVLEE

SEQ ID NO: 35661 - protein, 10 aa, Artificial Sequence
  Description of Artificial Sequence: Synthetic epitope
QEKKITQGKM

SEQ ID NO: 35662 - protein, 10 aa, Artificial Sequence
  Description of Artificial Sequence: Synthetic epitope
QEKKMFRIRN

SEQ ID NO: 35663 - protein, 10 aa, Artificial Sequence
  Description of Artificial Sequence: Synthetic epitope
QEKKRLKISK

SEQ ID NO: 35664 - protein, 10 aa, Artificial Sequence
  Description of Artificial Sequence: Synthetic epitope
QEKKSNTILG

SEQ ID NO: 35665 - protein, 10 aa, Artificial Sequence
  Description of Artificial Sequence: Synthetic epitope
QEKKSNTILG

SEQ ID NO: 35666 - protein, 10 aa, Artificial Sequence
  Description of Artificial Sequence: Synthetic epitope
QEKLAEANLL

SEQ ID NO: 35667 - protein, 10 aa, Artificial Sequence
  Description of Artificial Sequence: Synthetic epitope
QEKLKTELRK

SEQ ID NO: 35668 - protein, 10 aa, Artificial Sequence
  Description of Artificial Sequence: Synthetic epitope
QEKLKWEMQL

SEQ ID NO: 35669 - protein, 10 aa, Artificial Sequence
  Description of Artificial Sequence: Synthetic epitope
QEKLLKKVEE

SEQ ID NO: 35670 - protein, 10 aa, Artificial Sequence
  Description of Artificial Sequence: Synthetic epitope
QEKLSVIQAD

SEQ ID NO: 35671 - protein, 10 aa, Artificial Sequence
  Description of Artificial Sequence: Synthetic epitope
QEKMAATSKE

SEQ ID NO: 35672 - protein, 10 aa, Artificial Sequence
  Description of Artificial Sequence: Synthetic epitope
QEKMLLENKN

SEQ ID NO: 35673 - protein, 10 aa, Artificial Sequence
  Description of Artificial Sequence: Synthetic epitope
QEKMNLIQKS

SEQ ID NO: 35674 - protein, 10 aa, Artificial Sequence
  Description of Artificial Sequence: Synthetic epitope
QEKNIVVMEE

SEQ ID NO: 35675 - protein, 10 aa, Artificial Sequence
  Description of Artificial Sequence: Synthetic epitope
QEKPSHVRAS

SEQ ID NO: 35676 - protein, 10 aa, Artificial Sequence
  Description of Artificial Sequence: Synthetic epitope
QEKQEGVSTK

SEQ ID NO: 35677 - protein, 10 aa, Artificial Sequence
  Description of Artificial Sequence: Synthetic epitope
QEKQKAQKTP

SEQ ID NO: 35678 - protein, 10 aa, Artificial Sequence
  Description of Artificial Sequence: Synthetic epitope
QEKQKSERET

SEQ ID NO: 35679 - protein, 10 aa, Artificial Sequence
  Description of Artificial Sequence: Synthetic epitope
QEKQPQIINP

SEQ ID NO: 35680 - protein, 10 aa, Artificial Sequence
  Description of Artificial Sequence: Synthetic epitope
QEKQSTRAPA

SEQ ID NO: 35681 - protein, 10 aa, Artificial Sequence
  Description of Artificial Sequence: Synthetic epitope
QEKSKENSSK

SEQ ID NO: 35682 - protein, 10 aa, Artificial Sequence
  Description of Artificial Sequence: Synthetic epitope
QEKSKQIKIA

SEQ ID NO: 35683 - protein, 10 aa, Artificial Sequence
  Description of Artificial Sequence: Synthetic epitope
QEKSKSGEKI

SEQ ID NO: 35684 - protein, 10 aa, Artificial Sequence
  Description of Artificial Sequence: Synthetic epitope
QEKSLKASKS

SEQ ID NO: 35685 - protein, 10 aa, Artificial Sequence
  Description of Artificial Sequence: Synthetic epitope
QEKTQRYKEQ

SEQ ID NO: 35686 - protein, 10 aa, Artificial Sequence
  Description of Artificial Sequence: Synthetic epitope
QEKTSNFNAA

SEQ ID NO: 35687 - protein, 10 aa, Artificial Sequence
  Description of Artificial Sequence: Synthetic epitope
QEKTTLQPTL

SEQ ID NO: 35688 - protein, 10 aa, Artificial Sequence
  Description of Artificial Sequence: Synthetic epitope
QEKVESAQSE

SEQ ID NO: 35689 - protein, 10 aa, Artificial Sequence
  Description of Artificial Sequence: Synthetic epitope
QEKVEVLEAK

SEQ ID NO: 35690 - protein, 10 aa, Artificial Sequence
  Description of Artificial Sequence: Synthetic epitope
QEKVLLRKEL

SEQ ID NO: 35691 - protein, 10 aa, Artificial Sequence
  Description of Artificial Sequence: Synthetic epitope
QEKVTSEELN

SEQ ID NO: 35692 - protein, 10 aa, Artificial Sequence
  Description of Artificial Sequence: Synthetic epitope
QEKYKASQKE

SEQ ID NO: 35693 - protein, 10 aa, Artificial Sequence
  Description of Artificial Sequence: Synthetic epitope
QELAALALKQ

SEQ ID NO: 35694 - protein, 10 aa, Artificial Sequence
  Description of Artificial Sequence: Synthetic epitope
QELAASSQQK

SEQ ID NO: 35695 - protein, 10 aa, Artificial Sequence
  Description of Artificial Sequence: Synthetic epitope
QELAETLANL

SEQ ID NO: 35696 - protein, 10 aa, Artificial Sequence
  Description of Artificial Sequence: Synthetic epitope
QELAKALESL

SEQ ID NO: 35697 - protein, 10 aa, Artificial Sequence
  Description of Artificial Sequence: Synthetic epitope
QELAKMLLAM

SEQ ID NO: 35698 - protein, 10 aa, Artificial Sequence
  Description of Artificial Sequence: Synthetic epitope
QELANSRMAE

SEQ ID NO: 35699 - protein, 10 aa, Artificial Sequence
  Description of Artificial Sequence: Synthetic epitope
QELAQLKKLE

SEQ ID NO: 35700 - protein, 10 aa, Artificial Sequence
  Description of Artificial Sequence: Synthetic epitope
QELARTSKQK

SEQ ID NO: 35701 - protein, 10 aa, Artificial Sequence
  Description of Artificial Sequence: Synthetic epitope
QELASDGEIE

SEQ ID NO: 35702 - protein, 10 aa, Artificial Sequence
  Description of Artificial Sequence: Synthetic epitope
QELASELNKQ

SEQ ID NO: 35703 - protein, 10 aa, Artificial Sequence
  Description of Artificial Sequence: Synthetic epitope
QELEEKAELL

SEQ ID NO: 35704 - protein, 10 aa, Artificial Sequence
  Description of Artificial Sequence: Synthetic epitope
QELEGERASS

SEQ ID NO: 35705 - protein, 10 aa, Artificial Sequence
  Description of Artificial Sequence: Synthetic epitope
QELESDIQLT

SEQ ID NO: 35706 - protein, 10 aa, Artificial Sequence
  Description of Artificial Sequence: Synthetic epitope
QELETSLAEL

SEQ ID NO: 35707 - protein, 10 aa, Artificial Sequence
  Description of Artificial Sequence: Synthetic epitope
QELFKILHSI

SEQ ID NO: 35708 - protein, 10 aa, Artificial Sequence
  Description of Artificial Sequence: Synthetic epitope
QELFMRSSQT

SEQ ID NO: 35709 - protein, 10 aa, Artificial Sequence
  Description of Artificial Sequence: Synthetic epitope
QELGIAQLLD

SEQ ID NO: 35710 - protein, 10 aa, Artificial Sequence
  Description of Artificial Sequence: Synthetic epitope
QELGKANTTD

SEQ ID NO: 35711 - protein, 10 aa, Artificial Sequence
  Description of Artificial Sequence: Synthetic epitope
QELHSELMWK

SEQ ID NO: 35712 - protein, 10 aa, Artificial Sequence
  Description of Artificial Sequence: Synthetic epitope
QELILNQASM

SEQ ID NO: 35713 - protein, 10 aa, Artificial Sequence
  Description of Artificial Sequence: Synthetic epitope
QELISELDRR

SEQ ID NO: 35714 - protein, 10 aa, Artificial Sequence
  Description of Artificial Sequence: Synthetic epitope
QELISKTLDA

SEQ ID NO: 35715 - protein, 10 aa, Artificial Sequence
  Description of Artificial Sequence: Synthetic epitope
QELKANEHQL

SEQ ID NO: 35716 - protein, 10 aa, Artificial Sequence
  Description of Artificial Sequence: Synthetic epitope
QELKKTMALF

SEQ ID NO: 35717 - protein, 10 aa, Artificial Sequence
  Description of Artificial Sequence: Synthetic epitope
QELKNAVETD

SEQ ID NO: 35718 - protein, 10 aa, Artificial Sequence
  Description of Artificial Sequence: Synthetic epitope
QELKSMVATK

SEQ ID NO: 35719 - protein, 10 aa, Artificial Sequence
  Description of Artificial Sequence: Synthetic epitope
QELLATSAAE

SEQ ID NO: 35720 - protein, 10 aa, Artificial Sequence
  Description of Artificial Sequence: Synthetic epitope
QELLDEAELE

SEQ ID NO: 35721 - protein, 10 aa, Artificial Sequence
  Description of Artificial Sequence: Synthetic epitope
QELLKLEDTE

SEQ ID NO: 35722 - protein, 10 aa, Artificial Sequence
  Description of Artificial Sequence: Synthetic epitope
QELLKTEALK

SEQ ID NO: 35723 - protein, 10 aa, Artificial Sequence
  Description of Artificial Sequence: Synthetic epitope
QELMESGQAV

SEQ ID NO: 35724 - protein, 10 aa, Artificial Sequence
  Description of Artificial Sequence: Synthetic epitope
QELMSMSIAP

SEQ ID NO: 35725 - protein, 10 aa, Artificial Sequence
  Description of Artificial Sequence: Synthetic epitope
QELNAKRSHL

SEQ ID NO: 35726 - protein, 10 aa, Artificial Sequence
  Description of Artificial Sequence: Synthetic epitope
QELNKITTQL

SEQ ID NO: 35727 - protein, 10 aa, Artificial Sequence
  Description of Artificial Sequence: Synthetic epitope
QELNKQTKKN

SEQ ID NO: 35728 - protein, 10 aa, Artificial Sequence
  Description of Artificial Sequence: Synthetic epitope
QELPSVSQET

SEQ ID NO: 35729 - protein, 10 aa, Artificial Sequence
  Description of Artificial Sequence: Synthetic epitope
QELQAAGSRK

SEQ ID NO: 35730 - protein, 10 aa, Artificial Sequence
  Description of Artificial Sequence: Synthetic epitope
QELQAKLAEI

SEQ ID NO: 35731 - protein, 10 aa, Artificial Sequence
  Description of Artificial Sequence: Synthetic epitope
QELQIGADDV

SEQ ID NO: 35732 - protein, 10 aa, Artificial Sequence
  Description of Artificial Sequence: Synthetic epitope
QELQIMDERI

SEQ ID NO: 35733 - protein, 10 aa, Artificial Sequence
  Description of Artificial Sequence: Synthetic epitope
QELQLEFTET

SEQ ID NO: 35734 - protein, 10 aa, Artificial Sequence
  Description of Artificial Sequence: Synthetic epitope
QELQLIIAQR

SEQ ID NO: 35735 - protein, 10 aa, Artificial Sequence
  Description of Artificial Sequence: Synthetic epitope
QELQSMNIIP

SEQ ID NO: 35736 - protein, 10 aa, Artificial Sequence
  Description of Artificial Sequence: Synthetic epitope
QELRVAQTEF

SEQ ID NO: 35737 - protein, 10 aa, Artificial Sequence
  Description of Artificial Sequence: Synthetic epitope
QELSAEFSRA

SEQ ID NO: 35738 - protein, 10 aa, Artificial Sequence
  Description of Artificial Sequence: Synthetic epitope
QELSESFSSL

SEQ ID NO: 35739 - protein, 10 aa, Artificial Sequence
  Description of Artificial Sequence: Synthetic epitope
QELSRSLSVG

SEQ ID NO: 35740 - protein, 10 aa, Artificial Sequence
  Description of Artificial Sequence: Synthetic epitope
QELSSHRWDA

SEQ ID NO: 35741 - protein, 10 aa, Artificial Sequence
  Description of Artificial Sequence: Synthetic epitope
QELSTVNMMD

SEQ ID NO: 35742 - protein, 10 aa, Artificial Sequence
  Description of Artificial Sequence: Synthetic epitope
QELSYQQGQV

SEQ ID NO: 35743 - protein, 10 aa, Artificial Sequence
  Description of Artificial Sequence: Synthetic epitope
QELTEGREKF

SEQ ID NO: 35744 - protein, 10 aa, Artificial Sequence
  Description of Artificial Sequence: Synthetic epitope
QELTMTQFLS

SEQ ID NO: 35745 - protein, 10 aa, Artificial Sequence
  Description of Artificial Sequence: Synthetic epitope
QELTQQTNEE

SEQ ID NO: 35746 - protein, 10 aa, Artificial Sequence
  Description of Artificial Sequence: Synthetic epitope
QELTSLENLE

SEQ ID NO: 35747 - protein, 10 aa, Artificial Sequence
  Description of Artificial Sequence: Synthetic epitope
QELVELKHAA

SEQ ID NO: 35748 - protein, 10 aa, Artificial Sequence
  Description of Artificial Sequence: Synthetic epitope
QELVQKEEST

SEQ ID NO: 35749 - protein, 10 aa, Artificial Sequence
  Description of Artificial Sequence: Synthetic epitope
QELVQYPVEH

SEQ ID NO: 35750 - protein, 10 aa, Artificial Sequence
  Description of Artificial Sequence: Synthetic epitope
QELVRNMKEN

SEQ ID NO: 35751 - protein, 10 aa, Artificial Sequence
  Description of Artificial Sequence: Synthetic epitope
QELVRTTHQD

SEQ ID NO: 35752 - protein, 10 aa, Artificial Sequence
  Description of Artificial Sequence: Synthetic epitope
QELVSQGIEQ

SEQ ID NO: 35753 - protein, 10 aa, Artificial Sequence
  Description of Artificial Sequence: Synthetic epitope
QELVSYKKTS

SEQ ID NO: 35754 - protein, 10 aa, Artificial Sequence
  Description of Artificial Sequence: Synthetic epitope
QEMAEVRKDD

SEQ ID NO: 35755 - protein, 10 aa, Artificial Sequence
  Description of Artificial Sequence: Synthetic epitope
QEMAGRALKQ

SEQ ID NO: 35756 - protein, 10 aa, Artificial Sequence
  Description of Artificial Sequence: Synthetic epitope
QEMAIDIIPP

SEQ ID NO: 35757 - protein, 10 aa, Artificial Sequence
  Description of Artificial Sequence: Synthetic epitope
QEMAIQQSLG

SEQ ID NO: 35758 - protein, 10 aa, Artificial Sequence
  Description of Artificial Sequence: Synthetic epitope
QEMEAMSDEQ

SEQ ID NO: 35759 - protein, 10 aa, Artificial Sequence
  Description of Artificial Sequence: Synthetic epitope
QEMEHGIYTD

SEQ ID NO: 35760 - protein, 10 aa, Artificial Sequence
  Description of Artificial Sequence: Synthetic epitope
QEMEILYKKE

SEQ ID NO: 35761 - protein, 10 aa, Artificial Sequence
  Description of Artificial Sequence: Synthetic epitope
QEMESLHLSE

SEQ ID NO: 35762 - protein, 10 aa, Artificial Sequence
  Description of Artificial Sequence: Synthetic epitope
QEMEVHAEKL

SEQ ID NO: 35763 - protein, 10 aa, Artificial Sequence
  Description of Artificial Sequence: Synthetic epitope
QEMKIKENKP

SEQ ID NO: 35764 - protein, 10 aa, Artificial Sequence
  Description of Artificial Sequence: Synthetic epitope
QEMLMGLEAK

SEQ ID NO: 35765 - protein, 10 aa, Artificial Sequence
  Description of Artificial Sequence: Synthetic epitope
QEMMERLKAE

SEQ ID NO: 35766 - protein, 10 aa, Artificial Sequence
  Description of Artificial Sequence: Synthetic epitope
QEMMKVLNRM

SEQ ID NO: 35767 - protein, 10 aa, Artificial Sequence
  Description of Artificial Sequence: Synthetic epitope
QEMQEVQSSR

SEQ ID NO: 35768 - protein, 10 aa, Artificial Sequence
  Description of Artificial Sequence: Synthetic epitope
QEMSIGKKRN

SEQ ID NO: 35769 - protein, 10 aa, Artificial Sequence
  Description of Artificial Sequence: Synthetic epitope
QEMTKMASRP

SEQ ID NO: 35770 - protein, 10 aa, Artificial Sequence
  Description of Artificial Sequence: Synthetic epitope
QEMVESNEAK

SEQ ID NO: 35771 - protein, 10 aa, Artificial Sequence
  Description of Artificial Sequence: Synthetic epitope
QEMVRTDVNL

SEQ ID NO: 35772 - protein, 10 aa, Artificial Sequence
  Description of Artificial Sequence: Synthetic epitope
QENATQKEQL

SEQ ID NO: 35773 - protein, 10 aa, Artificial Sequence
  Description of Artificial Sequence: Synthetic epitope
QENAVEITRQ

SEQ ID NO: 35774 - protein, 10 aa, Artificial Sequence
  Description of Artificial Sequence: Synthetic epitope
QENDASMRDV

SEQ ID NO: 35775 - protein, 10 aa, Artificial Sequence
  Description of Artificial Sequence: Synthetic epitope
QENDKEQHED

SEQ ID NO: 35776 - protein, 10 aa, Artificial Sequence
  Description of Artificial Sequence: Synthetic epitope
QENDRQKWEK

SEQ ID NO: 35777 - protein, 10 aa, Artificial Sequence
  Description of Artificial Sequence: Synthetic epitope
QENEHALQKD

SEQ ID NO: 35778 - protein, 10 aa, Artificial Sequence
  Description of Artificial Sequence: Synthetic epitope
QENIDEIILQ

SEQ ID NO: 35779 - protein, 10 aa, Artificial Sequence
  Description of Artificial Sequence: Synthetic epitope
QENIETLALE

SEQ ID NO: 35780 - protein, 10 aa, Artificial Sequence
  Description of Artificial Sequence: Synthetic epitope
QENKQLRKET

SEQ ID NO: 35781 - protein, 10 aa, Artificial Sequence
  Description of Artificial Sequence: Synthetic epitope
QENLANKEKA

SEQ ID NO: 35782 - protein, 10 aa, Artificial Sequence
  Description of Artificial Sequence: Synthetic epitope
QENLEKSASS

SEQ ID NO: 35783 - protein, 10 aa, Artificial Sequence
  Description of Artificial Sequence: Synthetic epitope
QENLSLSVPQ

SEQ ID NO: 35784 - protein, 10 aa, Artificial Sequence
  Description of Artificial Sequence: Synthetic epitope
QENMQIQSFP

SEQ ID NO: 35785 - protein, 10 aa, Artificial Sequence
  Description of Artificial Sequence: Synthetic epitope
QENQMWNREG

SEQ ID NO: 35786 - protein, 10 aa, Artificial Sequence
  Description of Artificial Sequence: Synthetic epitope
QENSKNSYTE

SEQ ID NO: 35787 - protein, 10 aa, Artificial Sequence
  Description of Artificial Sequence: Synthetic epitope
QENSTLSASN

SEQ ID NO: 35788 - protein, 10 aa, Artificial Sequence
  Description of Artificial Sequence: Synthetic epitope
QENTESEYYA

SEQ ID NO: 35789 - protein, 10 aa, Artificial Sequence
  Description of Artificial Sequence: Synthetic epitope
QENTIIENPD

SEQ ID NO: 35790 - protein, 10 aa, Artificial Sequence
  Description of Artificial Sequence: Synthetic epitope
QENTQDGHKG

SEQ ID NO: 35791 - protein, 10 aa, Artificial Sequence
  Description of Artificial Sequence: Synthetic epitope
QENTQIEPSE

SEQ ID NO: 35792 - protein, 10 aa, Artificial Sequence
  Description of Artificial Sequence: Synthetic epitope
QENTTHVEEV

SEQ ID NO: 35793 - protein, 10 aa, Artificial Sequence
  Description of Artificial Sequence: Synthetic epitope
QENVEDQNEQ

SEQ ID NO: 35794 - protein, 10 aa, Artificial Sequence
  Description of Artificial Sequence: Synthetic epitope
QENVIESERG

SEQ ID NO: 35795 - protein, 10 aa, Artificial Sequence
  Description of Artificial Sequence: Synthetic epitope
QENVINHTDE

SEQ ID NO: 35796 - protein, 10 aa, Artificial Sequence
  Description of Artificial Sequence: Synthetic epitope
QENVKVVYYR

SEQ ID NO: 35797 - protein, 10 aa, Artificial Sequence
  Description of Artificial Sequence: Synthetic epitope
QENVVLPQIH

SEQ ID NO: 35798 - protein, 10 aa, Artificial Sequence
  Description of Artificial Sequence: Synthetic epitope
QENVVSVNDF

SEQ ID NO: 35799 - protein, 10 aa, Artificial Sequence
  Description of Artificial Sequence: Synthetic epitope
QENWDNVKHA

SEQ ID NO: 35800 - protein, 10 aa, Artificial Sequence
  Description of Artificial Sequence: Synthetic epitope
QEPADDSSFS

SEQ ID NO: 35801 - protein, 10 aa, Artificial Sequence
  Description of Artificial Sequence: Synthetic epitope
QEPAKKVKAK

SEQ ID NO: 35802 - protein, 10 aa, Artificial Sequence
  Description of Artificial Sequence: Synthetic epitope
QEPDLAQVLK

SEQ ID NO: 35803 - protein, 10 aa, Artificial Sequence
  Description of Artificial Sequence: Synthetic epitope
QEPEEQSLQK

SEQ ID NO: 35804 - protein, 10 aa, Artificial Sequence
  Description of Artificial Sequence: Synthetic epitope
QEPEKKSQMP

SEQ ID NO: 35805 - protein, 10 aa, Artificial Sequence
  Description of Artificial Sequence: Synthetic epitope
QEPESEVNTA

SEQ ID NO: 35806 - protein, 10 aa, Artificial Sequence
  Description of Artificial Sequence: Synthetic epitope
QEPKTTSLQK

SEQ ID NO: 35807 - protein, 10 aa, Artificial Sequence
  Description of Artificial Sequence: Synthetic epitope
QEPSSVSQTR

SEQ ID NO: 35808 - protein, 10 aa, Artificial Sequence
  Description of Artificial Sequence: Synthetic epitope
QEPSVETSII

SEQ ID NO: 35809 - protein, 10 aa, Artificial Sequence
  Description of Artificial Sequence: Synthetic epitope
QEPTLKTVLN

SEQ ID NO: 35810 - protein, 10 aa, Artificial Sequence
  Description of Artificial Sequence: Synthetic epitope
QEPYPVTKNI

SEQ ID NO: 35811 - protein, 10 aa, Artificial Sequence
  Description of Artificial Sequence: Synthetic epitope
QEQADAAKFM

SEQ ID NO: 35812 - protein, 10 aa, Artificial Sequence
  Description of Artificial Sequence: Synthetic epitope
QEQALLEEIE

SEQ ID NO: 35813 - protein, 10 aa, Artificial Sequence
  Description of Artificial Sequence: Synthetic epitope
QEQARARHEK

SEQ ID NO: 35814 - protein, 10 aa, Artificial Sequence
  Description of Artificial Sequence: Synthetic epitope
QEQEEKMRRQ

SEQ ID NO: 35815 - protein, 10 aa, Artificial Sequence
  Description of Artificial Sequence: Synthetic epitope
QEQENFLAVE

SEQ ID NO: 35816 - protein, 10 aa, Artificial Sequence
  Description of Artificial Sequence: Synthetic epitope
QEQFTTQKHH

SEQ ID NO: 35817 - protein, 10 aa, Artificial Sequence
  Description of Artificial Sequence: Synthetic epitope
QEQHQLSSRR

SEQ ID NO: 35818 - protein, 10 aa, Artificial Sequence
  Description of Artificial Sequence: Synthetic epitope
QEQHSSKSEK

SEQ ID NO: 35819 - protein, 10 aa, Artificial Sequence
  Description of Artificial Sequence: Synthetic epitope
QEQIIQMNGK

SEQ ID NO: 35820 - protein, 10 aa, Artificial Sequence
  Description of Artificial Sequence: Synthetic epitope
QEQIKKQKAN

SEQ ID NO: 35821 - protein, 10 aa, Artificial Sequence
  Description of Artificial Sequence: Synthetic epitope
QEQKATQKAI

SEQ ID NO: 35822 - protein, 10 aa, Artificial Sequence
  Description of Artificial Sequence: Synthetic epitope
QEQKEALIVK

SEQ ID NO: 35823 - protein, 10 aa, Artificial Sequence
  Description of Artificial Sequence: Synthetic epitope
QEQKTVNTVP

SEQ ID NO: 35824 - protein, 10 aa, Artificial Sequence
  Description of Artificial Sequence: Synthetic epitope
QEQLAQVAAN

SEQ ID NO: 35825 - protein, 10 aa, Artificial Sequence
  Description of Artificial Sequence: Synthetic epitope
QEQLAVAQTE

SEQ ID NO: 35826 - protein, 10 aa, Artificial Sequence
  Description of Artificial Sequence: Synthetic epitope
QEQLDKSTKL

SEQ ID NO: 35827 - protein, 10 aa, Artificial Sequence
  Description of Artificial Sequence: Synthetic epitope
QEQLEATVKK

SEQ ID NO: 35828 - protein, 10 aa, Artificial Sequence
  Description of Artificial Sequence: Synthetic epitope
QEQLGWNTHK

SEQ ID NO: 35829 - protein, 10 aa, Artificial Sequence
  Description of Artificial Sequence: Synthetic epitope
QEQLMTSEAT

SEQ ID NO: 35830 - protein, 10 aa, Artificial Sequence
  Description of Artificial Sequence: Synthetic epitope
QEQLVQEQEL

SEQ ID NO: 35831 - protein, 10 aa, Artificial Sequence
  Description of Artificial Sequence: Synthetic epitope
QEQMSALQAK

SEQ ID NO: 35832 - protein, 10 aa, Artificial Sequence
  Description of Artificial Sequence: Synthetic epitope
QEQMVSAGEL

SEQ ID NO: 35833 - protein, 10 aa, Artificial Sequence
  Description of Artificial Sequence: Synthetic epitope
QEQNQDAVAT

SEQ ID NO: 35834 - protein, 10 aa, Artificial Sequence
  Description of Artificial Sequence: Synthetic epitope
QEQNTAIREE

SEQ ID NO: 35835 - protein, 10 aa, Artificial Sequence
  Description of Artificial Sequence: Synthetic epitope
QEQPKLDSPV

SEQ ID NO: 35836 - protein, 10 aa, Artificial Sequence
  Description of Artificial Sequence: Synthetic epitope
QEQQETSGTK

SEQ ID NO: 35837 - protein, 10 aa, Artificial Sequence
  Description of Artificial Sequence: Synthetic epitope
QEQQHRQTEA

SEQ ID NO: 35838 - protein, 10 aa, Artificial Sequence
  Description of Artificial Sequence: Synthetic epitope
QEQQVARTIT

SEQ ID NO: 35839 - protein, 10 aa, Artificial Sequence
  Description of Artificial Sequence: Synthetic epitope
QEQRIMKEAR

SEQ ID NO: 35840 - protein, 10 aa, Artificial Sequence
  Description of Artificial Sequence: Synthetic epitope
QEQRKARKEA

SEQ ID NO: 35841 - protein, 10 aa, Artificial Sequence
  Description of Artificial Sequence: Synthetic epitope
QEQRTRAEEI

SEQ ID NO: 35842 - protein, 10 aa, Artificial Sequence
  Description of Artificial Sequence: Synthetic epitope
QEQSASSEDG

SEQ ID NO: 35843 - protein, 10 aa, Artificial Sequence
  Description of Artificial Sequence: Synthetic epitope
QEQSDPKSSD

SEQ ID NO: 35844 - protein, 10 aa, Artificial Sequence
  Description of Artificial Sequence: Synthetic epitope
QEQSETEEDS

SEQ ID NO: 35845 - protein, 10 aa, Artificial Sequence
  Description of Artificial Sequence: Synthetic epitope
QEQSIKAELE

SEQ ID NO: 35846 - protein, 10 aa, Artificial Sequence
  Description of Artificial Sequence: Synthetic epitope
QEQSNIVSAD

SEQ ID NO: 35847 - protein, 10 aa, Artificial Sequence
  Description of Artificial Sequence: Synthetic epitope
QEQTPKRSQS

SEQ ID NO: 35848 - protein, 10 aa, Artificial Sequence
  Description of Artificial Sequence: Synthetic epitope
QEQTRALDKQ

SEQ ID NO: 35849 - protein, 10 aa, Artificial Sequence
  Description of Artificial Sequence: Synthetic epitope
QEQVALKDAE

SEQ ID NO: 35850 - protein, 10 aa, Artificial Sequence
  Description of Artificial Sequence: Synthetic epitope
QEQVAVLTRQ

SEQ ID NO: 35851 - protein, 10 aa, Artificial Sequence
  Description of Artificial Sequence: Synthetic epitope
QEQVMAVTAQ

SEQ ID NO: 35852 - protein, 10 aa, Artificial Sequence
  Description of Artificial Sequence: Synthetic epitope
QEQVQLTFSA

SEQ ID NO: 35853 - protein, 10 aa, Artificial Sequence
  Description of Artificial Sequence: Synthetic epitope
QEQVTAAVAH

SEQ ID NO: 35854 - protein, 10 aa, Artificial Sequence
  Description of Artificial Sequence: Synthetic epitope
QEQVTQLTEK

SEQ ID NO: 35855 - protein, 10 aa, Artificial Sequence
  Description of Artificial Sequence: Synthetic epitope
QEQVVESDTL

SEQ ID NO: 35856 - protein, 10 aa, Artificial Sequence
  Description of Artificial Sequence: Synthetic epitope
QERAASAKGA

SEQ ID NO: 35857 - protein, 10 aa, Artificial Sequence
  Description of Artificial Sequence: Synthetic epitope
QERAEVGKEV

SEQ ID NO: 35858 - protein, 10 aa, Artificial Sequence
  Description of Artificial Sequence: Synthetic epitope
QERAKLSTSG

SEQ ID NO: 35859 - protein, 10 aa, Artificial Sequence
  Description of Artificial Sequence: Synthetic epitope
QERAKSRVRA

SEQ ID NO: 35860 - protein, 10 aa, Artificial Sequence
  Description of Artificial Sequence: Synthetic epitope
QERASQAERE

SEQ ID NO: 35861 - protein, 10 aa, Artificial Sequence
  Description of Artificial Sequence: Synthetic epitope
QERDQSTNIT

SEQ ID NO: 35862 - protein, 10 aa, Artificial Sequence
  Description of Artificial Sequence: Synthetic epitope
QERDQVMLAL

SEQ ID NO: 35863 - protein, 10 aa, Artificial Sequence
  Description of Artificial Sequence: Synthetic epitope
QERDSALRKS

SEQ ID NO: 35864 - protein, 10 aa, Artificial Sequence
  Description of Artificial Sequence: Synthetic epitope
QERDSMLLQQ

SEQ ID NO: 35865 - protein, 10 aa, Artificial Sequence
  Description of Artificial Sequence: Synthetic epitope
QERDSQIKML

SEQ ID NO: 35866 - protein, 10 aa, Artificial Sequence
  Description of Artificial Sequence: Synthetic epitope
QEREMKYSRA

SEQ ID NO: 35867 - protein, 10 aa, Artificial Sequence
  Description of Artificial Sequence: Synthetic epitope
QEREPTRVWP

SEQ ID NO: 35868 - protein, 10 aa, Artificial Sequence
  Description of Artificial Sequence: Synthetic epitope
QEREQKLTVQ

SEQ ID NO: 35869 - protein, 10 aa, Artificial Sequence
  Description of Artificial Sequence: Synthetic epitope
QEREYAVQTS

SEQ ID NO: 35870 - protein, 10 aa, Artificial Sequence
  Description of Artificial Sequence: Synthetic epitope
QERFSAEQEQ

SEQ ID NO: 35871 - protein, 10 aa, Artificial Sequence
  Description of Artificial Sequence: Synthetic epitope
QERGMGEDFL

SEQ ID NO: 35872 - protein, 10 aa, Artificial Sequence
  Description of Artificial Sequence: Synthetic epitope
QERIAHQRMG

SEQ ID NO: 35873 - protein, 10 aa, Artificial Sequence
  Description of Artificial Sequence: Synthetic epitope
QERKWMKTEG

SEQ ID NO: 35874 - protein, 10 aa, Artificial Sequence
  Description of Artificial Sequence: Synthetic epitope
QERLEQRDRQ

SEQ ID NO: 35875 - protein, 10 aa, Artificial Sequence
  Description of Artificial Sequence: Synthetic epitope
QERQRLGQRQ

SEQ ID NO: 35876 - protein, 10 aa, Artificial Sequence
  Description of Artificial Sequence: Synthetic epitope
QERRGKQSVG

SEQ ID NO: 35877 - protein, 10 aa, Artificial Sequence
  Description of Artificial Sequence: Synthetic epitope
QERRQKLMEE

SEQ ID NO: 35878 - protein, 10 aa, Artificial Sequence
  Description of Artificial Sequence: Synthetic epitope
QERRTALEAR

SEQ ID NO: 35879 - protein, 10 aa, Artificial Sequence
  Description of Artificial Sequence: Synthetic epitope
QERRTQMETE

SEQ ID NO: 35880 - protein, 10 aa, Artificial Sequence
  Description of Artificial Sequence: Synthetic epitope
QERSESDSSP

SEQ ID NO: 35881 - protein, 10 aa, Artificial Sequence
  Description of Artificial Sequence: Synthetic epitope
QERSETFLEV

SEQ ID NO: 35882 - protein, 10 aa, Artificial Sequence
  Description of Artificial Sequence: Synthetic epitope
QERSTKEKQS

SEQ ID NO: 35883 - protein, 10 aa, Artificial Sequence
  Description of Artificial Sequence: Synthetic epitope
QERTAQTSGP

SEQ ID NO: 35884 - protein, 10 aa, Artificial Sequence
  Description of Artificial Sequence: Synthetic epitope
QERTLALVDT

SEQ ID NO: 35885 - protein, 10 aa, Artificial Sequence
  Description of Artificial Sequence: Synthetic epitope
QERTVKDQDI

SEQ ID NO: 35886 - protein, 10 aa, Artificial Sequence
  Description of Artificial Sequence: Synthetic epitope
QERVGMSLVA

SEQ ID NO: 35887 - protein, 10 aa, Artificial Sequence
  Description of Artificial Sequence: Synthetic epitope
QERVSKAKHL

SEQ ID NO: 35888 - protein, 10 aa, Artificial Sequence
  Description of Artificial Sequence: Synthetic epitope
QESAASVEQW

SEQ ID NO: 35889 - protein, 10 aa, Artificial Sequence
  Description of Artificial Sequence: Synthetic epitope
QESALRRNLS

SEQ ID NO: 35890 - protein, 10 aa, Artificial Sequence
  Description of Artificial Sequence: Synthetic epitope
QESASVKSDP

SEQ ID NO: 35891 - protein, 10 aa, Artificial Sequence
  Description of Artificial Sequence: Synthetic epitope
QESDSINNLQ

SEQ ID NO: 35892 - protein, 10 aa, Artificial Sequence
  Description of Artificial Sequence: Synthetic epitope
QESEAEEDNQ

SEQ ID NO: 35893 - protein, 10 aa, Artificial Sequence
  Description of Artificial Sequence: Synthetic epitope
QESEISKESQ

SEQ ID NO: 35894 - protein, 10 aa, Artificial Sequence
  Description of Artificial Sequence: Synthetic epitope
QESELQRKQQ

SEQ ID NO: 35895 - protein, 10 aa, Artificial Sequence
  Description of Artificial Sequence: Synthetic epitope
QESEMEELPS

SEQ ID NO: 35896 - protein, 10 aa, Artificial Sequence
  Description of Artificial Sequence: Synthetic epitope
QESETSLQSI

SEQ ID NO: 35897 - protein, 10 aa, Artificial Sequence
  Description of Artificial Sequence: Synthetic epitope
QESEVLNRRS

SEQ ID NO: 35898 - protein, 10 aa, Artificial Sequence
  Description of Artificial Sequence: Synthetic epitope
QESFTSVKKP

SEQ ID NO: 35899 - protein, 10 aa, Artificial Sequence
  Description of Artificial Sequence: Synthetic epitope
QESGNAYTKE

SEQ ID NO: 35900 - protein, 10 aa, Artificial Sequence
  Description of Artificial Sequence: Synthetic epitope
QESGTKLKPM

SEQ ID NO: 35901 - protein, 10 aa, Artificial Sequence
  Description of Artificial Sequence: Synthetic epitope
QESHTESESG

SEQ ID NO: 35902 - protein, 10 aa, Artificial Sequence
  Description of Artificial Sequence: Synthetic epitope
QESIHSKAYN

SEQ ID NO: 35903 - protein, 10 aa, Artificial Sequence
  Description of Artificial Sequence: Synthetic epitope
QESILPTTAL

SEQ ID NO: 35904 - protein, 10 aa, Artificial Sequence
  Description of Artificial Sequence: Synthetic epitope
QESISKQQPH

SEQ ID NO: 35905 - protein, 10 aa, Artificial Sequence
  Description of Artificial Sequence: Synthetic epitope
QESISQELKP

SEQ ID NO: 35906 - protein, 10 aa, Artificial Sequence
  Description of Artificial Sequence: Synthetic epitope
QESKEKKVSE

SEQ ID NO: 35907 - protein, 10 aa, Artificial Sequence
  Description of Artificial Sequence: Synthetic epitope
QESKERAAEM

SEQ ID NO: 35908 - protein, 10 aa, Artificial Sequence
  Description of Artificial Sequence: Synthetic epitope
QESKEVEETA

SEQ ID NO: 35909 - protein, 10 aa, Artificial Sequence
  Description of Artificial Sequence: Synthetic epitope
QESKSKFQRE

SEQ ID NO: 35910 - protein, 10 aa, Artificial Sequence
  Description of Artificial Sequence: Synthetic epitope
QESLEAEEMD

SEQ ID NO: 35911 - protein, 10 aa, Artificial Sequence
  Description of Artificial Sequence: Synthetic epitope
QESLETSNLV

SEQ ID NO: 35912 - protein, 10 aa, Artificial Sequence
  Description of Artificial Sequence: Synthetic epitope
QESLLEEDSE

SEQ ID NO: 35913 - protein, 10 aa, Artificial Sequence
  Description of Artificial Sequence: Synthetic epitope
QESLQEEKES

SEQ ID NO: 35914 - protein, 10 aa, Artificial Sequence
  Description of Artificial Sequence: Synthetic epitope
QESLSKTKLQ

SEQ ID NO: 35915 - protein, 10 aa, Artificial Sequence
  Description of Artificial Sequence: Synthetic epitope
QESLTESTSL

SEQ ID NO: 35916 - protein, 10 aa, Artificial Sequence
  Description of Artificial Sequence: Synthetic epitope
QESNGSANFY

SEQ ID NO: 35917 - protein, 10 aa, Artificial Sequence
  Description of Artificial Sequence: Synthetic epitope
QESNSSLTGQ

SEQ ID NO: 35918 - protein, 10 aa, Artificial Sequence
  Description of Artificial Sequence: Synthetic epitope
QESPADAVGG

SEQ ID NO: 35919 - protein, 10 aa, Artificial Sequence
  Description of Artificial Sequence: Synthetic epitope
QESPEERTVN

SEQ ID NO: 35920 - protein, 10 aa, Artificial Sequence
  Description of Artificial Sequence: Synthetic epitope
QESPSTNTES

SEQ ID NO: 35921 - protein, 10 aa, Artificial Sequence
  Description of Artificial Sequence: Synthetic epitope
QESQEQSEVD

SEQ ID NO: 35922 - protein, 10 aa, Artificial Sequence
  Description of Artificial Sequence: Synthetic epitope
QESQESESEG

SEQ ID NO: 35923 - protein, 10 aa, Artificial Sequence
  Description of Artificial Sequence: Synthetic epitope
QESQMSLKDG

SEQ ID NO: 35924 - protein, 10 aa, Artificial Sequence
  Description of Artificial Sequence: Synthetic epitope
QESQRQAPEL

SEQ ID NO: 35925 - protein, 10 aa, Artificial Sequence
  Description of Artificial Sequence: Synthetic epitope
QESQSALEAA

SEQ ID NO: 35926 - protein, 10 aa, Artificial Sequence
  Description of Artificial Sequence: Synthetic epitope
QESRFLIEMA

SEQ ID NO: 35927 - protein, 10 aa, Artificial Sequence
  Description of Artificial Sequence: Synthetic epitope
QESRTRKRRG

SEQ ID NO: 35928 - protein, 10 aa, Artificial Sequence
  Description of Artificial Sequence: Synthetic epitope
QESSEDVSGG

SEQ ID NO: 35929 - protein, 10 aa, Artificial Sequence
  Description of Artificial Sequence: Synthetic epitope
QESSEENSLN

SEQ ID NO: 35930 - protein, 10 aa, Artificial Sequence
  Description of Artificial Sequence: Synthetic epitope
QESSEQKNKS

SEQ ID NO: 35931 - protein, 10 aa, Artificial Sequence
  Description of Artificial Sequence: Synthetic epitope
QESSETEDMS

SEQ ID NO: 35932 - protein, 10 aa, Artificial Sequence
  Description of Artificial Sequence: Synthetic epitope
QESSETEDMS

SEQ ID NO: 35933 - protein, 10 aa, Artificial Sequence
  Description of Artificial Sequence: Synthetic epitope
QESSKLSSLE

SEQ ID NO: 35934 - protein, 10 aa, Artificial Sequence
  Description of Artificial Sequence: Synthetic epitope
QESSMSESKV

SEQ ID NO: 35935 - protein, 10 aa, Artificial Sequence
  Description of Artificial Sequence: Synthetic epitope
QESSRKSPSE

SEQ ID NO: 35936 - protein, 10 aa, Artificial Sequence
  Description of Artificial Sequence: Synthetic epitope
QESSVASAME

SEQ ID NO: 35937 - protein, 10 aa, Artificial Sequence
  Description of Artificial Sequence: Synthetic epitope
QESTKFKNVW

SEQ ID NO: 35938 - protein, 10 aa, Artificial Sequence
  Description of Artificial Sequence: Synthetic epitope
QESTQVLREL

SEQ ID NO: 35939 - protein, 10 aa, Artificial Sequence
  Description of Artificial Sequence: Synthetic epitope
QESTQVLREL

SEQ ID NO: 35940 - protein, 10 aa, Artificial Sequence
  Description of Artificial Sequence: Synthetic epitope
QESTSKADLN

SEQ ID NO: 35941 - protein, 10 aa, Artificial Sequence
  Description of Artificial Sequence: Synthetic epitope
QESTVATERQ

SEQ ID NO: 35942 - protein, 10 aa, Artificial Sequence
  Description of Artificial Sequence: Synthetic epitope
QESVQLGAIE

SEQ ID NO: 35943 - protein, 10 aa, Artificial Sequence
  Description of Artificial Sequence: Synthetic epitope
QESVTSVTEL

SEQ ID NO: 35944 - protein, 10 aa, Artificial Sequence
  Description of Artificial Sequence: Synthetic epitope
QESYKLMEMK

SEQ ID NO: 35945 - protein, 10 aa, Artificial Sequence
  Description of Artificial Sequence: Synthetic epitope
QETAALKKQM

SEQ ID NO: 35946 - protein, 10 aa, Artificial Sequence
  Description of Artificial Sequence: Synthetic epitope
QETEIQQVNS

SEQ ID NO: 35947 - protein, 10 aa, Artificial Sequence
  Description of Artificial Sequence: Synthetic epitope
QETELSQRIR

SEQ ID NO: 35948 - protein, 10 aa, Artificial Sequence
  Description of Artificial Sequence: Synthetic epitope
QETEPSATST

SEQ ID NO: 35949 - protein, 10 aa, Artificial Sequence
  Description of Artificial Sequence: Synthetic epitope
QETERSKEEA

SEQ ID NO: 35950 - protein, 10 aa, Artificial Sequence
  Description of Artificial Sequence: Synthetic epitope
QETGIKVRSR

SEQ ID NO: 35951 - protein, 10 aa, Artificial Sequence
  Description of Artificial Sequence: Synthetic epitope
QETILDLRTP

SEQ ID NO: 35952 - protein, 10 aa, Artificial Sequence
  Description of Artificial Sequence: Synthetic epitope
QETIQAQNDL

SEQ ID NO: 35953 - protein, 10 aa, Artificial Sequence
  Description of Artificial Sequence: Synthetic epitope
QETKESQKVE

SEQ ID NO: 35954 - protein, 10 aa, Artificial Sequence
  Description of Artificial Sequence: Synthetic epitope
QETKSLKQKE

SEQ ID NO: 35955 - protein, 10 aa, Artificial Sequence
  Description of Artificial Sequence: Synthetic epitope
QETLEINNDK

SEQ ID NO: 35956 - protein, 10 aa, Artificial Sequence
  Description of Artificial Sequence: Synthetic epitope
QETNKQPPQT

SEQ ID NO: 35957 - protein, 10 aa, Artificial Sequence
  Description of Artificial Sequence: Synthetic epitope
QETNYQDSWV

SEQ ID NO: 35958 - protein, 10 aa, Artificial Sequence
  Description of Artificial Sequence: Synthetic epitope
QETQKLKKRR

SEQ ID NO: 35959 - protein, 10 aa, Artificial Sequence
  Description of Artificial Sequence: Synthetic epitope
QETRDGADGA

SEQ ID NO: 35960 - protein, 10 aa, Artificial Sequence
  Description of Artificial Sequence: Synthetic epitope
QETRKLVKPK

SEQ ID NO: 35961 - protein, 10 aa, Artificial Sequence
  Description of Artificial Sequence: Synthetic epitope
QETRSRSFSH

SEQ ID NO: 35962 - protein, 10 aa, Artificial Sequence
  Description of Artificial Sequence: Synthetic epitope
QETSESPREE

SEQ ID NO: 35963 - protein, 10 aa, Artificial Sequence
  Description of Artificial Sequence: Synthetic epitope
QETSRSSGRK

SEQ ID NO: 35964 - protein, 10 aa, Artificial Sequence
  Description of Artificial Sequence: Synthetic epitope
QETSSIVSVP

SEQ ID NO: 35965 - protein, 10 aa, Artificial Sequence
  Description of Artificial Sequence: Synthetic epitope
QETSTMTMNV

SEQ ID NO: 35966 - protein, 10 aa, Artificial Sequence
  Description of Artificial Sequence: Synthetic epitope
QETSTTRTMK

SEQ ID NO: 35967 - protein, 10 aa, Artificial Sequence
  Description of Artificial Sequence: Synthetic epitope
QETTDSILSH

SEQ ID NO: 35968 - protein, 10 aa, Artificial Sequence
  Description of Artificial Sequence: Synthetic epitope
QETTEEFNRE

SEQ ID NO: 35969 - protein, 10 aa, Artificial Sequence
  Description of Artificial Sequence: Synthetic epitope
QETTIIASNA

SEQ ID NO: 35970 - protein, 10 aa, Artificial Sequence
  Description of Artificial Sequence: Synthetic epitope
QETTRQSSLS

SEQ ID NO: 35971 - protein, 10 aa, Artificial Sequence
  Description of Artificial Sequence: Synthetic epitope
QETVDEKTEK

SEQ ID NO: 35972 - protein, 10 aa, Artificial Sequence
  Description of Artificial Sequence: Synthetic epitope
QETVDYMIKQ

SEQ ID NO: 35973 - protein, 10 aa, Artificial Sequence
  Description of Artificial Sequence: Synthetic epitope
QETVEVSQYS

SEQ ID NO: 35974 - protein, 10 aa, Artificial Sequence
  Description of Artificial Sequence: Synthetic epitope
QEVAGLSKQL

SEQ ID NO: 35975 - protein, 10 aa, Artificial Sequence
  Description of Artificial Sequence: Synthetic epitope
QEVARKHIIS

SEQ ID NO: 35976 - protein, 10 aa, Artificial Sequence
  Description of Artificial Sequence: Synthetic epitope
QEVASIAVDM

SEQ ID NO: 35977 - protein, 10 aa, Artificial Sequence
  Description of Artificial Sequence: Synthetic epitope
QEVDDYHAFQ

SEQ ID NO: 35978 - protein, 10 aa, Artificial Sequence
  Description of Artificial Sequence: Synthetic epitope
QEVDSRDWAL

SEQ ID NO: 35979 - protein, 10 aa, Artificial Sequence
  Description of Artificial Sequence: Synthetic epitope
QEVELTLETV

SEQ ID NO: 35980 - protein, 10 aa, Artificial Sequence
  Description of Artificial Sequence: Synthetic epitope
QEVESHEEVD

SEQ ID NO: 35981 - protein, 10 aa, Artificial Sequence
  Description of Artificial Sequence: Synthetic epitope
QEVESMETPE

SEQ ID NO: 35982 - protein, 10 aa, Artificial Sequence
  Description of Artificial Sequence: Synthetic epitope
QEVEVKTKKL

SEQ ID NO: 35983 - protein, 10 aa, Artificial Sequence
  Description of Artificial Sequence: Synthetic epitope
QEVEVLLSEN

SEQ ID NO: 35984 - protein, 10 aa, Artificial Sequence
  Description of Artificial Sequence: Synthetic epitope
QEVISKPQTP

SEQ ID NO: 35985 - protein, 10 aa, Artificial Sequence
  Description of Artificial Sequence: Synthetic epitope
QEVKSKQRKK

SEQ ID NO: 35986 - protein, 10 aa, Artificial Sequence
  Description of Artificial Sequence: Synthetic epitope
QEVLATVPFH

SEQ ID NO: 35987 - protein, 10 aa, Artificial Sequence
  Description of Artificial Sequence: Synthetic epitope
QEVLLSSGEA

SEQ ID NO: 35988 - protein, 10 aa, Artificial Sequence
  Description of Artificial Sequence: Synthetic epitope
QEVLSEETVH

SEQ ID NO: 35989 - protein, 10 aa, Artificial Sequence
  Description of Artificial Sequence: Synthetic epitope
QEVLSRDEIE

SEQ ID NO: 35990 - protein, 10 aa, Artificial Sequence
  Description of Artificial Sequence: Synthetic epitope
QEVLTITPFQ

SEQ ID NO: 35991 - protein, 10 aa, Artificial Sequence
  Description of Artificial Sequence: Synthetic epitope
QEVLTRIQSS

SEQ ID NO: 35992 - protein, 10 aa, Artificial Sequence
  Description of Artificial Sequence: Synthetic epitope
QEVLYLAEGD

SEQ ID NO: 35993 - protein, 10 aa, Artificial Sequence
  Description of Artificial Sequence: Synthetic epitope
QEVNQTTDQS

SEQ ID NO: 35994 - protein, 10 aa, Artificial Sequence
  Description of Artificial Sequence: Synthetic epitope
QEVNSLIQKP

SEQ ID NO: 35995 - protein, 10 aa, Artificial Sequence
  Description of Artificial Sequence: Synthetic epitope
QEVQAAFVKL

SEQ ID NO: 35996 - protein, 10 aa, Artificial Sequence
  Description of Artificial Sequence: Synthetic epitope
QEVQLMTKIE

SEQ ID NO: 35997 - protein, 10 aa, Artificial Sequence
  Description of Artificial Sequence: Synthetic epitope
QEVSAYLTRF

SEQ ID NO: 35998 - protein, 10 aa, Artificial Sequence
  Description of Artificial Sequence: Synthetic epitope
QEVSTEEQRE

SEQ ID NO: 35999 - protein, 10 aa, Artificial Sequence
  Description of Artificial Sequence: Synthetic epitope
QEVTAKTKTE

SEQ ID NO: 36000 - protein, 10 aa, Artificial Sequence
  Description of Artificial Sequence: Synthetic epitope
QEVVESSQLA

SEQ ID NO: 36001 - protein, 10 aa, Artificial Sequence
  Description of Artificial Sequence: Synthetic epitope
QEVVQSQQVA

SEQ ID NO: 36002 - protein, 10 aa, Artificial Sequence
  Description of Artificial Sequence: Synthetic epitope
QEVVSDERHQ

SEQ ID NO: 36003 - protein, 10 aa, Artificial Sequence
  Description of Artificial Sequence: Synthetic epitope
QEWFWGSIQM

SEQ ID NO: 36004 - protein, 10 aa, Artificial Sequence
  Description of Artificial Sequence: Synthetic epitope
QEWLDELEEM

SEQ ID NO: 36005 - protein, 10 aa, Artificial Sequence
  Description of Artificial Sequence: Synthetic epitope
QEWQKVHGTK

SEQ ID NO: 36006 - protein, 10 aa, Artificial Sequence
  Description of Artificial Sequence: Synthetic epitope
QEYDSTSAKQ

SEQ ID NO: 36007 - protein, 10 aa, Artificial Sequence
  Description of Artificial Sequence: Synthetic epitope
QEYEFIVLPN

SEQ ID NO: 36008 - protein, 10 aa, Artificial Sequence
  Description of Artificial Sequence: Synthetic epitope
QEYEFTDDPI

SEQ ID NO: 36009 - protein, 10 aa, Artificial Sequence
  Description of Artificial Sequence: Synthetic epitope
QEYGRAVTAS

SEQ ID NO: 36010 - protein, 10 aa, Artificial Sequence
  Description of Artificial Sequence: Synthetic epitope
QEYIAVVKKL

SEQ ID NO: 36011 - protein, 10 aa, Artificial Sequence
  Description of Artificial Sequence: Synthetic epitope
QEYIDSQKLE

SEQ ID NO: 36012 - protein, 10 aa, Artificial Sequence
  Description of Artificial Sequence: Synthetic epitope
QEYKKAEKKV

SEQ ID NO: 36013 - protein, 10 aa, Artificial Sequence
  Description of Artificial Sequence: Synthetic epitope
QEYLKIEKVD

SEQ ID NO: 36014 - protein, 10 aa, Artificial Sequence
  Description of Artificial Sequence: Synthetic epitope
QEYMAQMEKK

SEQ ID NO: 36015 - protein, 10 aa, Artificial Sequence
  Description of Artificial Sequence: Synthetic epitope
QEYMKVQTEI

SEQ ID NO: 36016 - protein, 10 aa, Artificial Sequence
  Description of Artificial Sequence: Synthetic epitope
QEYPNSQNWP

SEQ ID NO: 36017 - protein, 10 aa, Artificial Sequence
  Description of Artificial Sequence: Synthetic epitope
QEYQAQKAAK

SEQ ID NO: 36018 - protein, 10 aa, Artificial Sequence
  Description of Artificial Sequence: Synthetic epitope
QEYRKYGGAK

SEQ ID NO: 36019 - protein, 10 aa, Artificial Sequence
  Description of Artificial Sequence: Synthetic epitope
QEYRLLATTS

SEQ ID NO: 36020 - protein, 10 aa, Artificial Sequence
  Description of Artificial Sequence: Synthetic epitope
QFAASEDEAQ

SEQ ID NO: 36021 - protein, 10 aa, Artificial Sequence
  Description of Artificial Sequence: Synthetic epitope
QFAGRSKKET

SEQ ID NO: 36022 - protein, 10 aa, Artificial Sequence
  Description of Artificial Sequence: Synthetic epitope
QFAIKKTSED

SEQ ID NO: 36023 - protein, 10 aa, Artificial Sequence
  Description of Artificial Sequence: Synthetic epitope
QFAKGGKLEK

SEQ ID NO: 36024 - protein, 10 aa, Artificial Sequence
  Description of Artificial Sequence: Synthetic epitope
QFALAMPEAT

SEQ ID NO: 36025 - protein, 10 aa, Artificial Sequence
  Description of Artificial Sequence: Synthetic epitope
QFAPETLSKK

SEQ ID NO: 36026 - protein, 10 aa, Artificial Sequence
  Description of Artificial Sequence: Synthetic epitope
QFARHEWAQK

SEQ ID NO: 36027 - protein, 10 aa, Artificial Sequence
  Description of Artificial Sequence: Synthetic epitope
QFDLAQYEEQ

SEQ ID NO: 36028 - protein, 10 aa, Artificial Sequence
  Description of Artificial Sequence: Synthetic epitope
QFDVQKLRIY

SEQ ID NO: 36029 - protein, 10 aa, Artificial Sequence
  Description of Artificial Sequence: Synthetic epitope
QFEAWRSKYY

SEQ ID NO: 36030 - protein, 10 aa, Artificial Sequence
  Description of Artificial Sequence: Synthetic epitope
QFEESRLIRM

SEQ ID NO: 36031 - protein, 10 aa, Artificial Sequence
  Description of Artificial Sequence: Synthetic epitope
QFEETARVGQ

SEQ ID NO: 36032 - protein, 10 aa, Artificial Sequence
  Description of Artificial Sequence: Synthetic epitope
QFEMVQENTS

SEQ ID NO: 36033 - protein, 10 aa, Artificial Sequence
  Description of Artificial Sequence: Synthetic epitope
QFEPQKVKEK

SEQ ID NO: 36034 - protein, 10 aa, Artificial Sequence
  Description of Artificial Sequence: Synthetic epitope
QFETLVSGIK

SEQ ID NO: 36035 - protein, 10 aa, Artificial Sequence
  Description of Artificial Sequence: Synthetic epitope
QFFEEISTSG

SEQ ID NO: 36036 - protein, 10 aa, Artificial Sequence
  Description of Artificial Sequence: Synthetic epitope
QFFHRMMGFF

SEQ ID NO: 36037 - protein, 10 aa, Artificial Sequence
  Description of Artificial Sequence: Synthetic epitope
QFFNNVSLHH

SEQ ID NO: 36038 - protein, 10 aa, Artificial Sequence
  Description of Artificial Sequence: Synthetic epitope
QFFVKSFTTP

SEQ ID NO: 36039 - protein, 10 aa, Artificial Sequence
  Description of Artificial Sequence: Synthetic epitope
QFGQRIISEH

SEQ ID NO: 36040 - protein, 10 aa, Artificial Sequence
  Description of Artificial Sequence: Synthetic epitope
QFHATHYHPS

SEQ ID NO: 36041 - protein, 10 aa, Artificial Sequence
  Description of Artificial Sequence: Synthetic epitope
QFHEEMIGYY

SEQ ID NO: 36042 - protein, 10 aa, Artificial Sequence
  Description of Artificial Sequence: Synthetic epitope
QFHMPRASQF

SEQ ID NO: 36043 - protein, 10 aa, Artificial Sequence
  Description of Artificial Sequence: Synthetic epitope
QFHNEMNFPE

SEQ ID NO: 36044 - protein, 10 aa, Artificial Sequence
  Description of Artificial Sequence: Synthetic epitope
QFHNQGTQVA

SEQ ID NO: 36045 - protein, 10 aa, Artificial Sequence
  Description of Artificial Sequence: Synthetic epitope
QFIAQVQTNL

SEQ ID NO: 36046 - protein, 10 aa, Artificial Sequence
  Description of Artificial Sequence: Synthetic epitope
QFILKGIARL

SEQ ID NO: 36047 - protein, 10 aa, Artificial Sequence
  Description of Artificial Sequence: Synthetic epitope
QFISKRHHGF

SEQ ID NO: 36048 - protein, 10 aa, Artificial Sequence
  Description of Artificial Sequence: Synthetic epitope
QFIVTLVQNN

SEQ ID NO: 36049 - protein, 10 aa, Artificial Sequence
  Description of Artificial Sequence: Synthetic epitope
QFKEEQMSVQ

SEQ ID NO: 36050 - protein, 10 aa, Artificial Sequence
  Description of Artificial Sequence: Synthetic epitope
QFKGEASKPT

SEQ ID NO: 36051 - protein, 10 aa, Artificial Sequence
  Description of Artificial Sequence: Synthetic epitope
QFKKQSVANG

SEQ ID NO: 36052 - protein, 10 aa, Artificial Sequence
  Description of Artificial Sequence: Synthetic epitope
QFKLGARITE

SEQ ID NO: 36053 - protein, 10 aa, Artificial Sequence
  Description of Artificial Sequence: Synthetic epitope
QFKLKAINLQ

SEQ ID NO: 36054 - protein, 10 aa, Artificial Sequence
  Description of Artificial Sequence: Synthetic epitope
QFKRSEVSEE

SEQ ID NO: 36055 - protein, 10 aa, Artificial Sequence
  Description of Artificial Sequence: Synthetic epitope
QFLESLADNL

SEQ ID NO: 36056 - protein, 10 aa, Artificial Sequence
  Description of Artificial Sequence: Synthetic epitope
QFLESVANMF

SEQ ID NO: 36057 - protein, 10 aa, Artificial Sequence
  Description of Artificial Sequence: Synthetic epitope
QFLFNTSMLV

SEQ ID NO: 36058 - protein, 10 aa, Artificial Sequence
  Description of Artificial Sequence: Synthetic epitope
QFLISLVQSN

SEQ ID NO: 36059 - protein, 10 aa, Artificial Sequence
  Description of Artificial Sequence: Synthetic epitope
QFLKRSKVQE

SEQ ID NO: 36060 - protein, 10 aa, Artificial Sequence
  Description of Artificial Sequence: Synthetic epitope
QFLQQTMQGM

SEQ ID NO: 36061 - protein, 10 aa, Artificial Sequence
  Description of Artificial Sequence: Synthetic epitope
QFLRMAVKEL

SEQ ID NO: 36062 - protein, 10 aa, Artificial Sequence
  Description of Artificial Sequence: Synthetic epitope
QFLSSVIQNL

SEQ ID NO: 36063 - protein, 10 aa, Artificial Sequence
  Description of Artificial Sequence: Synthetic epitope
QFLTQLMQKE

SEQ ID NO: 36064 - protein, 10 aa, Artificial Sequence
  Description of Artificial Sequence: Synthetic epitope
QFLYGAMAQD

SEQ ID NO: 36065 - protein, 10 aa, Artificial Sequence
  Description of Artificial Sequence: Synthetic epitope
QFMDQSDIET

SEQ ID NO: 36066 - protein, 10 aa, Artificial Sequence
  Description of Artificial Sequence: Synthetic epitope
QFMPFTTVSE

SEQ ID NO: 36067 - protein, 10 aa, Artificial Sequence
  Description of Artificial Sequence: Synthetic epitope
QFNLEIIKII

SEQ ID NO: 36068 - protein, 10 aa, Artificial Sequence
  Description of Artificial Sequence: Synthetic epitope
QFPELTSHTM

SEQ ID NO: 36069 - protein, 10 aa, Artificial Sequence
  Description of Artificial Sequence: Synthetic epitope
QFPLASSMDL

SEQ ID NO: 36070 - protein, 10 aa, Artificial Sequence
  Description of Artificial Sequence: Synthetic epitope
QFPLDELKID

SEQ ID NO: 36071 - protein, 10 aa, Artificial Sequence
  Description of Artificial Sequence: Synthetic epitope
QFPPSWLYID

SEQ ID NO: 36072 - protein, 10 aa, Artificial Sequence
  Description of Artificial Sequence: Synthetic epitope
QFPSTEQRAV

SEQ ID NO: 36073 - protein, 10 aa, Artificial Sequence
  Description of Artificial Sequence: Synthetic epitope
QFPVSTESQK

SEQ ID NO: 36074 - protein, 10 aa, Artificial Sequence
  Description of Artificial Sequence: Synthetic epitope
QFQARKKQKV

SEQ ID NO: 36075 - protein, 10 aa, Artificial Sequence
  Description of Artificial Sequence: Synthetic epitope
QFQIEKWQIA

SEQ ID NO: 36076 - protein, 10 aa, Artificial Sequence
  Description of Artificial Sequence: Synthetic epitope
QFQKFLTEIS

SEQ ID NO: 36077 - protein, 10 aa, Artificial Sequence
  Description of Artificial Sequence: Synthetic epitope
QFQTAESENR

SEQ ID NO: 36078 - protein, 10 aa, Artificial Sequence
  Description of Artificial Sequence: Synthetic epitope
QFRATKYEVN

SEQ ID NO: 36079 - protein, 10 aa, Artificial Sequence
  Description of Artificial Sequence: Synthetic epitope
QFRDSASMHS

SEQ ID NO: 36080 - protein, 10 aa, Artificial Sequence
  Description of Artificial Sequence: Synthetic epitope
QFRESVEAIG

SEQ ID NO: 36081 - protein, 10 aa, Artificial Sequence
  Description of Artificial Sequence: Synthetic epitope
QFRKSVLADQ

SEQ ID NO: 36082 - protein, 10 aa, Artificial Sequence
  Description of Artificial Sequence: Synthetic epitope
QFRMMVSLGH

SEQ ID NO: 36083 - protein, 10 aa, Artificial Sequence
  Description of Artificial Sequence: Synthetic epitope
QFRNQTESSN

SEQ ID NO: 36084 - protein, 10 aa, Artificial Sequence
  Description of Artificial Sequence: Synthetic epitope
QFRVQAVQPT

SEQ ID NO: 36085 - protein, 10 aa, Artificial Sequence
  Description of Artificial Sequence: Synthetic epitope
QFRYQSNQQE

SEQ ID NO: 36086 - protein, 10 aa, Artificial Sequence
  Description of Artificial Sequence: Synthetic epitope
QFSDLKSQNP

SEQ ID NO: 36087 - protein, 10 aa, Artificial Sequence
  Description of Artificial Sequence: Synthetic epitope
QFSEIKLLQD

SEQ ID NO: 36088 - protein, 10 aa, Artificial Sequence
  Description of Artificial Sequence: Synthetic epitope
QFSGRKSTGS

SEQ ID NO: 36089 - protein, 10 aa, Artificial Sequence
  Description of Artificial Sequence: Synthetic epitope
QFSISESMKP

SEQ ID NO: 36090 - protein, 10 aa, Artificial Sequence
  Description of Artificial Sequence: Synthetic epitope
QFSKAKSASK

SEQ ID NO: 36091 - protein, 10 aa, Artificial Sequence
  Description of Artificial Sequence: Synthetic epitope
QFSTIQQNDW

SEQ ID NO: 36092 - protein, 10 aa, Artificial Sequence
  Description of Artificial Sequence: Synthetic epitope
QFSTLVESTA

SEQ ID NO: 36093 - protein, 10 aa, Artificial Sequence
  Description of Artificial Sequence: Synthetic epitope
QFSTSKYEVV

SEQ ID NO: 36094 - protein, 10 aa, Artificial Sequence
  Description of Artificial Sequence: Synthetic epitope
QFTASVLQQK

SEQ ID NO: 36095 - protein, 10 aa, Artificial Sequence
  Description of Artificial Sequence: Synthetic epitope
QFTSKLTSNQ

SEQ ID NO: 36096 - protein, 10 aa, Artificial Sequence
  Description of Artificial Sequence: Synthetic epitope
QFTTQVSRLM

SEQ ID NO: 36097 - protein, 10 aa, Artificial Sequence
  Description of Artificial Sequence: Synthetic epitope
QFTVISPITI

SEQ ID NO: 36098 - protein, 10 aa, Artificial Sequence
  Description of Artificial Sequence: Synthetic epitope
QFVGKDKSAM

SEQ ID NO: 36099 - protein, 10 aa, Artificial Sequence
  Description of Artificial Sequence: Synthetic epitope
QFVLMQQHQM

SEQ ID NO: 36100 - protein, 10 aa, Artificial Sequence
  Description of Artificial Sequence: Synthetic epitope
QFVNTVSASP

SEQ ID NO: 36101 - protein, 10 aa, Artificial Sequence
  Description of Artificial Sequence: Synthetic epitope
QFVQMVAELA

SEQ ID NO: 36102 - protein, 10 aa, Artificial Sequence
  Description of Artificial Sequence: Synthetic epitope
QFVSQADNIQ

SEQ ID NO: 36103 - protein, 10 aa, Artificial Sequence
  Description of Artificial Sequence: Synthetic epitope
QFVSSMSASA

SEQ ID NO: 36104 - protein, 10 aa, Artificial Sequence
  Description of Artificial Sequence: Synthetic epitope
QFVSSMSASA

SEQ ID NO: 36105 - protein, 10 aa, Artificial Sequence
  Description of Artificial Sequence: Synthetic epitope
QFWNKSAHRP

SEQ ID NO: 36106 - protein, 10 aa, Artificial Sequence
  Description of Artificial Sequence: Synthetic epitope
QFWSKTQVLD

SEQ ID NO: 36107 - protein, 10 aa, Artificial Sequence
  Description of Artificial Sequence: Synthetic epitope
QFYAKYKETR

SEQ ID NO: 36108 - protein, 10 aa, Artificial Sequence
  Description of Artificial Sequence: Synthetic epitope
QGAADSAPYD

SEQ ID NO: 36109 - protein, 10 aa, Artificial Sequence
  Description of Artificial Sequence: Synthetic epitope
QGAAPIQNQQ

SEQ ID NO: 36110 - protein, 10 aa, Artificial Sequence
  Description of Artificial Sequence: Synthetic epitope
QGAASDERKS

SEQ ID NO: 36111 - protein, 10 aa, Artificial Sequence
  Description of Artificial Sequence: Synthetic epitope
QGAASSASHL

SEQ ID NO: 36112 - protein, 10 aa, Artificial Sequence
  Description of Artificial Sequence: Synthetic epitope
QGAKPMARFN

SEQ ID NO: 36113 - protein, 10 aa, Artificial Sequence
  Description of Artificial Sequence: Synthetic epitope
QGAKSLFSTA

SEQ ID NO: 36114 - protein, 10 aa, Artificial Sequence
  Description of Artificial Sequence: Synthetic epitope
QGALESLRLA

SEQ ID NO: 36115 - protein, 10 aa, Artificial Sequence
  Description of Artificial Sequence: Synthetic epitope
QGALSLISKV

SEQ ID NO: 36116 - protein, 10 aa, Artificial Sequence
  Description of Artificial Sequence: Synthetic epitope
QGALTSRQLP

SEQ ID NO: 36117 - protein, 10 aa, Artificial Sequence
  Description of Artificial Sequence: Synthetic epitope
QGAMNTAQQN

SEQ ID NO: 36118 - protein, 10 aa, Artificial Sequence
  Description of Artificial Sequence: Synthetic epitope
QGANKQTKKQ

SEQ ID NO: 36119 - protein, 10 aa, Artificial Sequence
  Description of Artificial Sequence: Synthetic epitope
QGAQATSELR

SEQ ID NO: 36120 - protein, 10 aa, Artificial Sequence
  Description of Artificial Sequence: Synthetic epitope
QGAQVESQEV

SEQ ID NO: 36121 - protein, 10 aa, Artificial Sequence
  Description of Artificial Sequence: Synthetic epitope
QGASATVLEE

SEQ ID NO: 36122 - protein, 10 aa, Artificial Sequence
  Description of Artificial Sequence: Synthetic epitope
QGASQLTSLE

SEQ ID NO: 36123 - protein, 10 aa, Artificial Sequence
  Description of Artificial Sequence: Synthetic epitope
QGASTQASSM

SEQ ID NO: 36124 - protein, 10 aa, Artificial Sequence
  Description of Artificial Sequence: Synthetic epitope
QGATAEIFDD

SEQ ID NO: 36125 - protein, 10 aa, Artificial Sequence
  Description of Artificial Sequence: Synthetic epitope
QGATKNTNQN

SEQ ID NO: 36126 - protein, 10 aa, Artificial Sequence
  Description of Artificial Sequence: Synthetic epitope
QGATVVDQTT

SEQ ID NO: 36127 - protein, 10 aa, Artificial Sequence
  Description of Artificial Sequence: Synthetic epitope
QGAVANANST

SEQ ID NO: 36128 - protein, 10 aa, Artificial Sequence
  Description of Artificial Sequence: Synthetic epitope
QGAVEAAKVG

SEQ ID NO: 36129 - protein, 10 aa, Artificial Sequence
  Description of Artificial Sequence: Synthetic epitope
QGDRASLTSD

SEQ ID NO: 36130 - protein, 10 aa, Artificial Sequence
  Description of Artificial Sequence: Synthetic epitope
QGDRPLLSKV

SEQ ID NO: 36131 - protein, 10 aa, Artificial Sequence
  Description of Artificial Sequence: Synthetic epitope
QGDRSRALKR

SEQ ID NO: 36132 - protein, 10 aa, Artificial Sequence
  Description of Artificial Sequence: Synthetic epitope
QGDSTSKQTR

SEQ ID NO: 36133 - protein, 10 aa, Artificial Sequence
  Description of Artificial Sequence: Synthetic epitope
QGEAASREDT

SEQ ID NO: 36134 - protein, 10 aa, Artificial Sequence
  Description of Artificial Sequence: Synthetic epitope
QGEADAAKKQ

SEQ ID NO: 36135 - protein, 10 aa, Artificial Sequence
  Description of Artificial Sequence: Synthetic epitope
QGEAESKASK

SEQ ID NO: 36136 - protein, 10 aa, Artificial Sequence
  Description of Artificial Sequence: Synthetic epitope
QGEASAERVE

SEQ ID NO: 36137 - protein, 10 aa, Artificial Sequence
  Description of Artificial Sequence: Synthetic epitope
QGEDEKTSQT

SEQ ID NO: 36138 - protein, 10 aa, Artificial Sequence
  Description of Artificial Sequence: Synthetic epitope
QGEELSSGSL

SEQ ID NO: 36139 - protein, 10 aa, Artificial Sequence
  Description of Artificial Sequence: Synthetic epitope
QGEIAHVKKQ

SEQ ID NO: 36140 - protein, 10 aa, Artificial Sequence
  Description of Artificial Sequence: Synthetic epitope
QGEIERMEKQ

SEQ ID NO: 36141 - protein, 10 aa, Artificial Sequence
  Description of Artificial Sequence: Synthetic epitope
QGEIMKEDRM

SEQ ID NO: 36142 - protein, 10 aa, Artificial Sequence
  Description of Artificial Sequence: Synthetic epitope
QGEKVSDAVE

SEQ ID NO: 36143 - protein, 10 aa, Artificial Sequence
  Description of Artificial Sequence: Synthetic epitope
QGENLAADLG

SEQ ID NO: 36144 - protein, 10 aa, Artificial Sequence
  Description of Artificial Sequence: Synthetic epitope
QGERTSDRDV

SEQ ID NO: 36145 - protein, 10 aa, Artificial Sequence
  Description of Artificial Sequence: Synthetic epitope
QGESEESSAQ

SEQ ID NO: 36146 - protein, 10 aa, Artificial Sequence
  Description of Artificial Sequence: Synthetic epitope
QGEVTAQKRP

SEQ ID NO: 36147 - protein, 10 aa, Artificial Sequence
  Description of Artificial Sequence: Synthetic epitope
QGFFTSNNAT

SEQ ID NO: 36148 - protein, 10 aa, Artificial Sequence
  Description of Artificial Sequence: Synthetic epitope
QGFLIAVRGL

SEQ ID NO: 36149 - protein, 10 aa, Artificial Sequence
  Description of Artificial Sequence: Synthetic epitope
QGFQTQVLGF

SEQ ID NO: 36150 - protein, 10 aa, Artificial Sequence
  Description of Artificial Sequence: Synthetic epitope
QGFSPKAQKE

SEQ ID NO: 36151 - protein, 10 aa, Artificial Sequence
  Description of Artificial Sequence: Synthetic epitope
QGFVSKTLDS

SEQ ID NO: 36152 - protein, 10 aa, Artificial Sequence
  Description of Artificial Sequence: Synthetic epitope
QGGAAQSLVP

SEQ ID NO: 36153 - protein, 10 aa, Artificial Sequence
  Description of Artificial Sequence: Synthetic epitope
QGGESSHDHI

SEQ ID NO: 36154 - protein, 10 aa, Artificial Sequence
  Description of Artificial Sequence: Synthetic epitope
QGGESTKERF

SEQ ID NO: 36155 - protein, 10 aa, Artificial Sequence
  Description of Artificial Sequence: Synthetic epitope
QGGRLMSSRE

SEQ ID NO: 36156 - protein, 10 aa, Artificial Sequence
  Description of Artificial Sequence: Synthetic epitope
QGGRVKVDVP

SEQ ID NO: 36157 - protein, 10 aa, Artificial Sequence
  Description of Artificial Sequence: Synthetic epitope
QGGSKATTPA

SEQ ID NO: 36158 - protein, 10 aa, Artificial Sequence
  Description of Artificial Sequence: Synthetic epitope
QGGSQRSIAP

SEQ ID NO: 36159 - protein, 10 aa, Artificial Sequence
  Description of Artificial Sequence: Synthetic epitope
QGGTYSKAST

SEQ ID NO: 36160 - protein, 10 aa, Artificial Sequence
  Description of Artificial Sequence: Synthetic epitope
QGGVALVSHM

SEQ ID NO: 36161 - protein, 10 aa, Artificial Sequence
  Description of Artificial Sequence: Synthetic epitope
QGGVARIKPA

SEQ ID NO: 36162 - protein, 10 aa, Artificial Sequence
  Description of Artificial Sequence: Synthetic epitope
QGGVKKIISQ

SEQ ID NO: 36163 - protein, 10 aa, Artificial Sequence
  Description of Artificial Sequence: Synthetic epitope
QGHATKEDST

SEQ ID NO: 36164 - protein, 10 aa, Artificial Sequence
  Description of Artificial Sequence: Synthetic epitope
QGHDYTMDTS

SEQ ID NO: 36165 - protein, 10 aa, Artificial Sequence
  Description of Artificial Sequence: Synthetic epitope
QGHQERAEPR

SEQ ID NO: 36166 - protein, 10 aa, Artificial Sequence
  Description of Artificial Sequence: Synthetic epitope
QGHQYQSQET

SEQ ID NO: 36167 - protein, 10 aa, Artificial Sequence
  Description of Artificial Sequence: Synthetic epitope
QGHTRKEMGQ

SEQ ID NO: 36168 - protein, 10 aa, Artificial Sequence
  Description of Artificial Sequence: Synthetic epitope
QGIGTELTKS

SEQ ID NO: 36169 - protein, 10 aa, Artificial Sequence
  Description of Artificial Sequence: Synthetic epitope
QGIKSLSKTI

SEQ ID NO: 36170 - protein, 10 aa, Artificial Sequence
  Description of Artificial Sequence: Synthetic epitope
QGILEAAFSE

SEQ ID NO: 36171 - protein, 10 aa, Artificial Sequence
  Description of Artificial Sequence: Synthetic epitope
QGILSQSQDK

SEQ ID NO: 36172 - protein, 10 aa, Artificial Sequence
  Description of Artificial Sequence: Synthetic epitope
QGILVTNQDA

SEQ ID NO: 36173 - protein, 10 aa, Artificial Sequence
  Description of Artificial Sequence: Synthetic epitope
QGINLVQAKK

SEQ ID NO: 36174 - protein, 10 aa, Artificial Sequence
  Description of Artificial Sequence: Synthetic epitope
QGIQLKSVAD

SEQ ID NO: 36175 - protein, 10 aa, Artificial Sequence
  Description of Artificial Sequence: Synthetic epitope
QGIRIEKSAQ

SEQ ID NO: 36176 - protein, 10 aa, Artificial Sequence
  Description of Artificial Sequence: Synthetic epitope
QGISFSSNNE

SEQ ID NO: 36177 - protein, 10 aa, Artificial Sequence
  Description of Artificial Sequence: Synthetic epitope
QGISSIIKHY

SEQ ID NO: 36178 - protein, 10 aa, Artificial Sequence
  Description of Artificial Sequence: Synthetic epitope
QGISVAKTSL

SEQ ID NO: 36179 - protein, 10 aa, Artificial Sequence
  Description of Artificial Sequence: Synthetic epitope
QGITSTAQPL

SEQ ID NO: 36180 - protein, 10 aa, Artificial Sequence
  Description of Artificial Sequence: Synthetic epitope
QGIVNEVRQS

SEQ ID NO: 36181 - protein, 10 aa, Artificial Sequence
  Description of Artificial Sequence: Synthetic epitope
QGKALVSEEG

SEQ ID NO: 36182 - protein, 10 aa, Artificial Sequence
  Description of Artificial Sequence: Synthetic epitope
QGKARKTISD

SEQ ID NO: 36183 - protein, 10 aa, Artificial Sequence
  Description of Artificial Sequence: Synthetic epitope
QGKATSSETK

SEQ ID NO: 36184 - protein, 10 aa, Artificial Sequence
  Description of Artificial Sequence: Synthetic epitope
QGKEKHQTLE

SEQ ID NO: 36185 - protein, 10 aa, Artificial Sequence
  Description of Artificial Sequence: Synthetic epitope
QGKGSYKHDR

SEQ ID NO: 36186 - protein, 10 aa, Artificial Sequence
  Description of Artificial Sequence: Synthetic epitope
QGKHEIAAEH

SEQ ID NO: 36187 - protein, 10 aa, Artificial Sequence
  Description of Artificial Sequence: Synthetic epitope
QGKHLITDEL

SEQ ID NO: 36188 - protein, 10 aa, Artificial Sequence
  Description of Artificial Sequence: Synthetic epitope
QGKIPANQLA

SEQ ID NO: 36189 - protein, 10 aa, Artificial Sequence
  Description of Artificial Sequence: Synthetic epitope
QGKLAEVSQR

SEQ ID NO: 36190 - protein, 10 aa, Artificial Sequence
  Description of Artificial Sequence: Synthetic epitope
QGKLSKLDYR

SEQ ID NO: 36191 - protein, 10 aa, Artificial Sequence
  Description of Artificial Sequence: Synthetic epitope
QGKLTDRTAS

SEQ ID NO: 36192 - protein, 10 aa, Artificial Sequence
  Description of Artificial Sequence: Synthetic epitope
QGKLTTHKEE

SEQ ID NO: 36193 - protein, 10 aa, Artificial Sequence
  Description of Artificial Sequence: Synthetic epitope
QGKNEKEMKI

SEQ ID NO: 36194 - protein, 10 aa, Artificial Sequence
  Description of Artificial Sequence: Synthetic epitope
QGKQTKSTAD

SEQ ID NO: 36195 - protein, 10 aa, Artificial Sequence
  Description of Artificial Sequence: Synthetic epitope
QGKSLSSPTD

SEQ ID NO: 36196 - protein, 10 aa, Artificial Sequence
  Description of Artificial Sequence: Synthetic epitope
QGKSTSQLVN

SEQ ID NO: 36197 - protein, 10 aa, Artificial Sequence
  Description of Artificial Sequence: Synthetic epitope
QGKTKRPVDL

SEQ ID NO: 36198 - protein, 10 aa, Artificial Sequence
  Description of Artificial Sequence: Synthetic epitope
QGKTQISESD

SEQ ID NO: 36199 - protein, 10 aa, Artificial Sequence
  Description of Artificial Sequence: Synthetic epitope
QGKTSIDKLS

SEQ ID NO: 36200 - protein, 10 aa, Artificial Sequence
  Description of Artificial Sequence: Synthetic epitope
QGKWQSVAAS

SEQ ID NO: 36201 - protein, 10 aa, Artificial Sequence
  Description of Artificial Sequence: Synthetic epitope
QGLAALSEQG

SEQ ID NO: 36202 - protein, 10 aa, Artificial Sequence
  Description of Artificial Sequence: Synthetic epitope
QGLASRNIVK

SEQ ID NO: 36203 - protein, 10 aa, Artificial Sequence
  Description of Artificial Sequence: Synthetic epitope
QGLATLRAQG

SEQ ID NO: 36204 - protein, 10 aa, Artificial Sequence
  Description of Artificial Sequence: Synthetic epitope
QGLESSKQAE

SEQ ID NO: 36205 - protein, 10 aa, Artificial Sequence
  Description of Artificial Sequence: Synthetic epitope
QGLGFRNVVT

SEQ ID NO: 36206 - protein, 10 aa, Artificial Sequence
  Description of Artificial Sequence: Synthetic epitope
QGLIGVTDSY

SEQ ID NO: 36207 - protein, 10 aa, Artificial Sequence
  Description of Artificial Sequence: Synthetic epitope
QGLISAAQYY

SEQ ID NO: 36208 - protein, 10 aa, Artificial Sequence
  Description of Artificial Sequence: Synthetic epitope
QGLKAQSAGL

SEQ ID NO: 36209 - protein, 10 aa, Artificial Sequence
  Description of Artificial Sequence: Synthetic epitope
QGLKSTSNLK

SEQ ID NO: 36210 - protein, 10 aa, Artificial Sequence
  Description of Artificial Sequence: Synthetic epitope
QGLKTQRMKA

SEQ ID NO: 36211 - protein, 10 aa, Artificial Sequence
  Description of Artificial Sequence: Synthetic epitope
QGLLKAARKS

SEQ ID NO: 36212 - protein, 10 aa, Artificial Sequence
  Description of Artificial Sequence: Synthetic epitope
QGLLKAKYEL

SEQ ID NO: 36213 - protein, 10 aa, Artificial Sequence
  Description of Artificial Sequence: Synthetic epitope
QGLLQASAAT

SEQ ID NO: 36214 - protein, 10 aa, Artificial Sequence
  Description of Artificial Sequence: Synthetic epitope
QGLLSPTQVP

SEQ ID NO: 36215 - protein, 10 aa, Artificial Sequence
  Description of Artificial Sequence: Synthetic epitope
QGLLSSKVVG

SEQ ID NO: 36216 - protein, 10 aa, Artificial Sequence
  Description of Artificial Sequence: Synthetic epitope
QGLNAEKLMR

SEQ ID NO: 36217 - protein, 10 aa, Artificial Sequence
  Description of Artificial Sequence: Synthetic epitope
QGLQASDESQ

SEQ ID NO: 36218 - protein, 10 aa, Artificial Sequence
  Description of Artificial Sequence: Synthetic epitope
QGLQATSSAE

SEQ ID NO: 36219 - protein, 10 aa, Artificial Sequence
  Description of Artificial Sequence: Synthetic epitope
QGLQQSRISD

SEQ ID NO: 36220 - protein, 10 aa, Artificial Sequence
  Description of Artificial Sequence: Synthetic epitope
QGLSASALEG

SEQ ID NO: 36221 - protein, 10 aa, Artificial Sequence
  Description of Artificial Sequence: Synthetic epitope
QGLSSTVQSR

SEQ ID NO: 36222 - protein, 10 aa, Artificial Sequence
  Description of Artificial Sequence: Synthetic epitope
QGLVLDIYYQ

SEQ ID NO: 36223 - protein, 10 aa, Artificial Sequence
  Description of Artificial Sequence: Synthetic epitope
QGLYGLSAVQ

SEQ ID NO: 36224 - protein, 10 aa, Artificial Sequence
  Description of Artificial Sequence: Synthetic epitope
QGMAARANSL

SEQ ID NO: 36225 - protein, 10 aa, Artificial Sequence
  Description of Artificial Sequence: Synthetic epitope
QGMKTRRGDV

SEQ ID NO: 36226 - protein, 10 aa, Artificial Sequence
  Description of Artificial Sequence: Synthetic epitope
QGMNVSKLRN

SEQ ID NO: 36227 - protein, 10 aa, Artificial Sequence
  Description of Artificial Sequence: Synthetic epitope
QGNFMIKMKL

SEQ ID NO: 36228 - protein, 10 aa, Artificial Sequence
  Description of Artificial Sequence: Synthetic epitope
QGNGQQHVEK

SEQ ID NO: 36229 - protein, 10 aa, Artificial Sequence
  Description of Artificial Sequence: Synthetic epitope
QGNKTRLESS

SEQ ID NO: 36230 - protein, 10 aa, Artificial Sequence
  Description of Artificial Sequence: Synthetic epitope
QGNLDASGPA

SEQ ID NO: 36231 - protein, 10 aa, Artificial Sequence
  Description of Artificial Sequence: Synthetic epitope
QGNMIKLETK

SEQ ID NO: 36232 - protein, 10 aa, Artificial Sequence
  Description of Artificial Sequence: Synthetic epitope
QGNNDTDVFS

SEQ ID NO: 36233 - protein, 10 aa, Artificial Sequence
  Description of Artificial Sequence: Synthetic epitope
QGNRKTTKEG

SEQ ID NO: 36234 - protein, 10 aa, Artificial Sequence
  Description of Artificial Sequence: Synthetic epitope
QGNSRTQISD

SEQ ID NO: 36235 - protein, 10 aa, Artificial Sequence
  Description of Artificial Sequence: Synthetic epitope
QGNSSAGVEA

SEQ ID NO: 36236 - protein, 10 aa, Artificial Sequence
  Description of Artificial Sequence: Synthetic epitope
QGNTAATQTE

SEQ ID NO: 36237 - protein, 10 aa, Artificial Sequence
  Description of Artificial Sequence: Synthetic epitope
QGNTDEAQEE

SEQ ID NO: 36238 - protein, 10 aa, Artificial Sequence
  Description of Artificial Sequence: Synthetic epitope
QGPAKPVFEG

SEQ ID NO: 36239 - protein, 10 aa, Artificial Sequence
  Description of Artificial Sequence: Synthetic epitope
QGPERVEPDD

SEQ ID NO: 36240 - protein, 10 aa, Artificial Sequence
  Description of Artificial Sequence: Synthetic epitope
QGPFVQVDEL

SEQ ID NO: 36241 - protein, 10 aa, Artificial Sequence
  Description of Artificial Sequence: Synthetic epitope
QGPGTSNSAS

SEQ ID NO: 36242 - protein, 10 aa, Artificial Sequence
  Description of Artificial Sequence: Synthetic epitope
QGPLEISRSN

SEQ ID NO: 36243 - protein, 10 aa, Artificial Sequence
  Description of Artificial Sequence: Synthetic epitope
QGPQTPQSTS

SEQ ID NO: 36244 - protein, 10 aa, Artificial Sequence
  Description of Artificial Sequence: Synthetic epitope
QGPSSTKSTS

SEQ ID NO: 36245 - protein, 10 aa, Artificial Sequence
  Description of Artificial Sequence: Synthetic epitope
QGPTNEAQMA

SEQ ID NO: 36246 - protein, 10 aa, Artificial Sequence
  Description of Artificial Sequence: Synthetic epitope
QGQEERVKEK

SEQ ID NO: 36247 - protein, 10 aa, Artificial Sequence
  Description of Artificial Sequence: Synthetic epitope
QGQEQQVSEE

SEQ ID NO: 36248 - protein, 10 aa, Artificial Sequence
  Description of Artificial Sequence: Synthetic epitope
QGQISSQQVA

SEQ ID NO: 36249 - protein, 10 aa, Artificial Sequence
  Description of Artificial Sequence: Synthetic epitope
QGQLNQAMKI

SEQ ID NO: 36250 - protein, 10 aa, Artificial Sequence
  Description of Artificial Sequence: Synthetic epitope
QGQLRQAEAE

SEQ ID NO: 36251 - protein, 10 aa, Artificial Sequence
  Description of Artificial Sequence: Synthetic epitope
QGQQGQMASG

SEQ ID NO: 36252 - protein, 10 aa, Artificial Sequence
  Description of Artificial Sequence: Synthetic epitope
QGQQLATFSS

SEQ ID NO: 36253 - protein, 10 aa, Artificial Sequence
  Description of Artificial Sequence: Synthetic epitope
QGQQLVTKLV

SEQ ID NO: 36254 - protein, 10 aa, Artificial Sequence
  Description of Artificial Sequence: Synthetic epitope
QGQRSLLEHH

SEQ ID NO: 36255 - protein, 10 aa, Artificial Sequence
  Description of Artificial Sequence: Synthetic epitope
QGQSQGSSPS

SEQ ID NO: 36256 - protein, 10 aa, Artificial Sequence
  Description of Artificial Sequence: Synthetic epitope
QGQSQGTVDQ

SEQ ID NO: 36257 - protein, 10 aa, Artificial Sequence
  Description of Artificial Sequence: Synthetic epitope
QGQSQNKEVL

SEQ ID NO: 36258 - protein, 10 aa, Artificial Sequence
  Description of Artificial Sequence: Synthetic epitope
QGQSTLKISN

SEQ ID NO: 36259 - protein, 10 aa, Artificial Sequence
  Description of Artificial Sequence: Synthetic epitope
QGQTKEKMVT

SEQ ID NO: 36260 - protein, 10 aa, Artificial Sequence
  Description of Artificial Sequence: Synthetic epitope
QGQVEPQLLK

SEQ ID NO: 36261 - protein, 10 aa, Artificial Sequence
  Description of Artificial Sequence: Synthetic epitope
QGRASSLGTE

SEQ ID NO: 36262 - protein, 10 aa, Artificial Sequence
  Description of Artificial Sequence: Synthetic epitope
QGRISILMES

SEQ ID NO: 36263 - protein, 10 aa, Artificial Sequence
  Description of Artificial Sequence: Synthetic epitope
QGRKGKETKK

SEQ ID NO: 36264 - protein, 10 aa, Artificial Sequence
  Description of Artificial Sequence: Synthetic epitope
QGRLQSVEES

SEQ ID NO: 36265 - protein, 10 aa, Artificial Sequence
  Description of Artificial Sequence: Synthetic epitope
QGRNVKSRKL

SEQ ID NO: 36266 - protein, 10 aa, Artificial Sequence
  Description of Artificial Sequence: Synthetic epitope
QGRQQRRGKQ

SEQ ID NO: 36267 - protein, 10 aa, Artificial Sequence
  Description of Artificial Sequence: Synthetic epitope
QGRSTMTVSD

SEQ ID NO: 36268 - protein, 10 aa, Artificial Sequence
  Description of Artificial Sequence: Synthetic epitope
QGRSVASSKL

SEQ ID NO: 36269 - protein, 10 aa, Artificial Sequence
  Description of Artificial Sequence: Synthetic epitope
QGRSVAVQKQ

SEQ ID NO: 36270 - protein, 10 aa, Artificial Sequence
  Description of Artificial Sequence: Synthetic epitope
QGRTSNSGRQ

SEQ ID NO: 36271 - protein, 10 aa, Artificial Sequence
  Description of Artificial Sequence: Synthetic epitope
QGSATAAEAS

SEQ ID NO: 36272 - protein, 10 aa, Artificial Sequence
  Description of Artificial Sequence: Synthetic epitope
QGSDLIVPAG

SEQ ID NO: 36273 - protein, 10 aa, Artificial Sequence
  Description of Artificial Sequence: Synthetic epitope
QGSEISSIDE

SEQ ID NO: 36274 - protein, 10 aa, Artificial Sequence
  Description of Artificial Sequence: Synthetic epitope
QGSELRQLQQ

SEQ ID NO: 36275 - protein, 10 aa, Artificial Sequence
  Description of Artificial Sequence: Synthetic epitope
QGSETQSSDW

SEQ ID NO: 36276 - protein, 10 aa, Artificial Sequence
  Description of Artificial Sequence: Synthetic epitope
QGSETTLQST

SEQ ID NO: 36277 - protein, 10 aa, Artificial Sequence
  Description of Artificial Sequence: Synthetic epitope
QGSGRTSVKA

SEQ ID NO: 36278 - protein, 10 aa, Artificial Sequence
  Description of Artificial Sequence: Synthetic epitope
QGSGVKTQTG

SEQ ID NO: 36279 - protein, 10 aa, Artificial Sequence
  Description of Artificial Sequence: Synthetic epitope
QGSGVSLASK

SEQ ID NO: 36280 - protein, 10 aa, Artificial Sequence
  Description of Artificial Sequence: Synthetic epitope
QGSIGSLSLS

SEQ ID NO: 36281 - protein, 10 aa, Artificial Sequence
  Description of Artificial Sequence: Synthetic epitope
QGSIHKSKED

SEQ ID NO: 36282 - protein, 10 aa, Artificial Sequence
  Description of Artificial Sequence: Synthetic epitope
QGSITKRSLS

SEQ ID NO: 36283 - protein, 10 aa, Artificial Sequence
  Description of Artificial Sequence: Synthetic epitope
QGSKEDMTRS

SEQ ID NO: 36284 - protein, 10 aa, Artificial Sequence
  Description of Artificial Sequence: Synthetic epitope
QGSLINSLKP

SEQ ID NO: 36285 - protein, 10 aa, Artificial Sequence
  Description of Artificial Sequence: Synthetic epitope
QGSLRKGRSS

SEQ ID NO: 36286 - protein, 10 aa, Artificial Sequence
  Description of Artificial Sequence: Synthetic epitope
QGSMVQAKAD

SEQ ID NO: 36287 - protein, 10 aa, Artificial Sequence
  Description of Artificial Sequence: Synthetic epitope
QGSNKDTSWF

SEQ ID NO: 36288 - protein, 10 aa, Artificial Sequence
  Description of Artificial Sequence: Synthetic epitope
QGSNLSVQHQ

SEQ ID NO: 36289 - protein, 10 aa, Artificial Sequence
  Description of Artificial Sequence: Synthetic epitope
QGSQSALQTY

SEQ ID NO: 36290 - protein, 10 aa, Artificial Sequence
  Description of Artificial Sequence: Synthetic epitope
QGSSAQVTTV

SEQ ID NO: 36291 - protein, 10 aa, Artificial Sequence
  Description of Artificial Sequence: Synthetic epitope
QGSSESLASP

SEQ ID NO: 36292 - protein, 10 aa, Artificial Sequence
  Description of Artificial Sequence: Synthetic epitope
QGSSKERRTS

SEQ ID NO: 36293 - protein, 10 aa, Artificial Sequence
  Description of Artificial Sequence: Synthetic epitope
QGSSNSVSDT

SEQ ID NO: 36294 - protein, 10 aa, Artificial Sequence
  Description of Artificial Sequence: Synthetic epitope
QGSSNVAPVK

SEQ ID NO: 36295 - protein, 10 aa, Artificial Sequence
  Description of Artificial Sequence: Synthetic epitope
QGSSVTSVQL

SEQ ID NO: 36296 - protein, 10 aa, Artificial Sequence
  Description of Artificial Sequence: Synthetic epitope
QGSTMLTSQY

SEQ ID NO: 36297 - protein, 10 aa, Artificial Sequence
  Description of Artificial Sequence: Synthetic epitope
QGSVEQVRLL

SEQ ID NO: 36298 - protein, 10 aa, Artificial Sequence
  Description of Artificial Sequence: Synthetic epitope
QGSVRAKASS

SEQ ID NO: 36299 - protein, 10 aa, Artificial Sequence
  Description of Artificial Sequence: Synthetic epitope
QGTEISKTRQ

SEQ ID NO: 36300 - protein, 10 aa, Artificial Sequence
  Description of Artificial Sequence: Synthetic epitope
QGTEQATGAA

SEQ ID NO: 36301 - protein, 10 aa, Artificial Sequence
  Description of Artificial Sequence: Synthetic epitope
QGTESEEQEG

SEQ ID NO: 36302 - protein, 10 aa, Artificial Sequence
  Description of Artificial Sequence: Synthetic epitope
QGTFQADKTV

SEQ ID NO: 36303 - protein, 10 aa, Artificial Sequence
  Description of Artificial Sequence: Synthetic epitope
QGTIWFTVYK

SEQ ID NO: 36304 - protein, 10 aa, Artificial Sequence
  Description of Artificial Sequence: Synthetic epitope
QGTKTAEMEE

SEQ ID NO: 36305 - protein, 10 aa, Artificial Sequence
  Description of Artificial Sequence: Synthetic epitope
QGTKTEAERH

SEQ ID NO: 36306 - protein, 10 aa, Artificial Sequence
  Description of Artificial Sequence: Synthetic epitope
QGTLSASLNP

SEQ ID NO: 36307 - protein, 10 aa, Artificial Sequence
  Description of Artificial Sequence: Synthetic epitope
QGTMNRLLTS

SEQ ID NO: 36308 - protein, 10 aa, Artificial Sequence
  Description of Artificial Sequence: Synthetic epitope
QGTNQTEQNG

SEQ ID NO: 36309 - protein, 10 aa, Artificial Sequence
  Description of Artificial Sequence: Synthetic epitope
QGTQHNQKLN

SEQ ID NO: 36310 - protein, 10 aa, Artificial Sequence
  Description of Artificial Sequence: Synthetic epitope
QGTQVTELPP

SEQ ID NO: 36311 - protein, 10 aa, Artificial Sequence
  Description of Artificial Sequence: Synthetic epitope
QGTRVDDAKA

SEQ ID NO: 36312 - protein, 10 aa, Artificial Sequence
  Description of Artificial Sequence: Synthetic epitope
QGTSKAISKG

SEQ ID NO: 36313 - protein, 10 aa, Artificial Sequence
  Description of Artificial Sequence: Synthetic epitope
QGTSKVATSP

SEQ ID NO: 36314 - protein, 10 aa, Artificial Sequence
  Description of Artificial Sequence: Synthetic epitope
QGTTGIREDP

SEQ ID NO: 36315 - protein, 10 aa, Artificial Sequence
  Description of Artificial Sequence: Synthetic epitope
QGTTIREEDE

SEQ ID NO: 36316 - protein, 10 aa, Artificial Sequence
  Description of Artificial Sequence: Synthetic epitope
QGTVEKDKEM

SEQ ID NO: 36317 - protein, 10 aa, Artificial Sequence
  Description of Artificial Sequence: Synthetic epitope
QGTVGMQPQQ

SEQ ID NO: 36318 - protein, 10 aa, Artificial Sequence
  Description of Artificial Sequence: Synthetic epitope
QGTVSQAQER

SEQ ID NO: 36319 - protein, 10 aa, Artificial Sequence
  Description of Artificial Sequence: Synthetic epitope
QGTVTDTRMS

SEQ ID NO: 36320 - protein, 10 aa, Artificial Sequence
  Description of Artificial Sequence: Synthetic epitope
QGTYYHGQTE

SEQ ID NO: 36321 - protein, 10 aa, Artificial Sequence
  Description of Artificial Sequence: Synthetic epitope
QGVAVSMGTV

SEQ ID NO: 36322 - protein, 10 aa, Artificial Sequence
  Description of Artificial Sequence: Synthetic epitope
QGVEHATANK

SEQ ID NO: 36323 - protein, 10 aa, Artificial Sequence
  Description of Artificial Sequence: Synthetic epitope
QGVELTSIPA

SEQ ID NO: 36324 - protein, 10 aa, Artificial Sequence
  Description of Artificial Sequence: Synthetic epitope
QGVGISFAKS

SEQ ID NO: 36325 - protein, 10 aa, Artificial Sequence
  Description of Artificial Sequence: Synthetic epitope
QGVMADKNRL

SEQ ID NO: 36326 - protein, 10 aa, Artificial Sequence
  Description of Artificial Sequence: Synthetic epitope
QGVNVNLVTI

SEQ ID NO: 36327 - protein, 10 aa, Artificial Sequence
  Description of Artificial Sequence: Synthetic epitope
QGVPMVMGAG

SEQ ID NO: 36328 - protein, 10 aa, Artificial Sequence
  Description of Artificial Sequence: Synthetic epitope
QGVQREVSMV

SEQ ID NO: 36329 - protein, 10 aa, Artificial Sequence
  Description of Artificial Sequence: Synthetic epitope
QGVTISLNAT

SEQ ID NO: 36330 - protein, 10 aa, Artificial Sequence
  Description of Artificial Sequence: Synthetic epitope
QGVVDDEQVK

SEQ ID NO: 36331 - protein, 10 aa, Artificial Sequence
  Description of Artificial Sequence: Synthetic epitope
QGWHFKKDWV

SEQ ID NO: 36332 - protein, 10 aa, Artificial Sequence
  Description of Artificial Sequence: Synthetic epitope
QGWQADSTTR

SEQ ID NO: 36333 - protein, 10 aa, Artificial Sequence
  Description of Artificial Sequence: Synthetic epitope
QGWVLVEGTG

SEQ ID NO: 36334 - protein, 10 aa, Artificial Sequence
  Description of Artificial Sequence: Synthetic epitope
QGYQTQETVK

SEQ ID NO: 36335 - protein, 10 aa, Artificial Sequence
  Description of Artificial Sequence: Synthetic epitope
QGYRLGEDHK

SEQ ID NO: 36336 - protein, 10 aa, Artificial Sequence
  Description of Artificial Sequence: Synthetic epitope
QHAAVSEKLL

SEQ ID NO: 36337 - protein, 10 aa, Artificial Sequence
  Description of Artificial Sequence: Synthetic epitope
QHADQTVNED

SEQ ID NO: 36338 - protein, 10 aa, Artificial Sequence
  Description of Artificial Sequence: Synthetic epitope
QHAEALQQEQ

SEQ ID NO: 36339 - protein, 10 aa, Artificial Sequence
  Description of Artificial Sequence: Synthetic epitope
QHAGRILTTR

SEQ ID NO: 36340 - protein, 10 aa, Artificial Sequence
  Description of Artificial Sequence: Synthetic epitope
QHAHNSGEFA

SEQ ID NO: 36341 - protein, 10 aa, Artificial Sequence
  Description of Artificial Sequence: Synthetic epitope
QHALGQISKT

SEQ ID NO: 36342 - protein, 10 aa, Artificial Sequence
  Description of Artificial Sequence: Synthetic epitope
QHALMTIQQL

SEQ ID NO: 36343 - protein, 10 aa, Artificial Sequence
  Description of Artificial Sequence: Synthetic epitope
QHARNNIMKR

SEQ ID NO: 36344 - protein, 10 aa, Artificial Sequence
  Description of Artificial Sequence: Synthetic epitope
QHASLTFYQK

SEQ ID NO: 36345 - protein, 10 aa, Artificial Sequence
  Description of Artificial Sequence: Synthetic epitope
QHDESQHHQV

SEQ ID NO: 36346 - protein, 10 aa, Artificial Sequence
  Description of Artificial Sequence: Synthetic epitope
QHDSKKAGAE

SEQ ID NO: 36347 - protein, 10 aa, Artificial Sequence
  Description of Artificial Sequence: Synthetic epitope
QHEATDMSQS

SEQ ID NO: 36348 - protein, 10 aa, Artificial Sequence
  Description of Artificial Sequence: Synthetic epitope
QHEATPSSLY

SEQ ID NO: 36349 - protein, 10 aa, Artificial Sequence
  Description of Artificial Sequence: Synthetic epitope
QHEAVEESAS

SEQ ID NO: 36350 - protein, 10 aa, Artificial Sequence
  Description of Artificial Sequence: Synthetic epitope
QHEPAGQNEK

SEQ ID NO: 36351 - protein, 10 aa, Artificial Sequence
  Description of Artificial Sequence: Synthetic epitope
QHESAQLQEE

SEQ ID NO: 36352 - protein, 10 aa, Artificial Sequence
  Description of Artificial Sequence: Synthetic epitope
QHFKKRKIQD

SEQ ID NO: 36353 - protein, 10 aa, Artificial Sequence
  Description of Artificial Sequence: Synthetic epitope
QHFKTELKMK

SEQ ID NO: 36354 - protein, 10 aa, Artificial Sequence
  Description of Artificial Sequence: Synthetic epitope
QHFNLLNEMP

SEQ ID NO: 36355 - protein, 10 aa, Artificial Sequence
  Description of Artificial Sequence: Synthetic epitope
QHFQFQLLIQ

SEQ ID NO: 36356 - protein, 10 aa, Artificial Sequence
  Description of Artificial Sequence: Synthetic epitope
QHGEAALGKR

SEQ ID NO: 36357 - protein, 10 aa, Artificial Sequence
  Description of Artificial Sequence: Synthetic epitope
QHGGSSAPVE

SEQ ID NO: 36358 - protein, 10 aa, Artificial Sequence
  Description of Artificial Sequence: Synthetic epitope
QHGSGMSNRS

SEQ ID NO: 36359 - protein, 10 aa, Artificial Sequence
  Description of Artificial Sequence: Synthetic epitope
QHHAASAGLA

SEQ ID NO: 36360 - protein, 10 aa, Artificial Sequence
  Description of Artificial Sequence: Synthetic epitope
QHHAQPKRKK

SEQ ID NO: 36361 - protein, 10 aa, Artificial Sequence
  Description of Artificial Sequence: Synthetic epitope
QHHGQLAQPG

SEQ ID NO: 36362 - protein, 10 aa, Artificial Sequence
  Description of Artificial Sequence: Synthetic epitope
QHHPYVTHIP

SEQ ID NO: 36363 - protein, 10 aa, Artificial Sequence
  Description of Artificial Sequence: Synthetic epitope
QHHQSAMMHP

SEQ ID NO: 36364 - protein, 10 aa, Artificial Sequence
  Description of Artificial Sequence: Synthetic epitope
QHIIFGISLN

SEQ ID NO: 36365 - protein, 10 aa, Artificial Sequence
  Description of Artificial Sequence: Synthetic epitope
QHILQVQSLQ

SEQ ID NO: 36366 - protein, 10 aa, Artificial Sequence
  Description of Artificial Sequence: Synthetic epitope
QHISILLPKV

SEQ ID NO: 36367 - protein, 10 aa, Artificial Sequence
  Description of Artificial Sequence: Synthetic epitope
QHITKHLSME

SEQ ID NO: 36368 - protein, 10 aa, Artificial Sequence
  Description of Artificial Sequence: Synthetic epitope
QHKEIVTVKK

SEQ ID NO: 36369 - protein, 10 aa, Artificial Sequence
  Description of Artificial Sequence: Synthetic epitope
QHKNLLSEHE

SEQ ID NO: 36370 - protein, 10 aa, Artificial Sequence
  Description of Artificial Sequence: Synthetic epitope
QHKPHKQAAQ

SEQ ID NO: 36371 - protein, 10 aa, Artificial Sequence
  Description of Artificial Sequence: Synthetic epitope
QHKRLTQAIQ

SEQ ID NO: 36372 - protein, 10 aa, Artificial Sequence
  Description of Artificial Sequence: Synthetic epitope
QHKTTQIFHK

SEQ ID NO: 36373 - protein, 10 aa, Artificial Sequence
  Description of Artificial Sequence: Synthetic epitope
QHKVDSEYQA

SEQ ID NO: 36374 - protein, 10 aa, Artificial Sequence
  Description of Artificial Sequence: Synthetic epitope
QHLATFIMDK

SEQ ID NO: 36375 - protein, 10 aa, Artificial Sequence
  Description of Artificial Sequence: Synthetic epitope
QHLMYMMEKI

SEQ ID NO: 36376 - protein, 10 aa, Artificial Sequence
  Description of Artificial Sequence: Synthetic epitope
QHLNESQHNY

SEQ ID NO: 36377 - protein, 10 aa, Artificial Sequence
  Description of Artificial Sequence: Synthetic epitope
QHLNQQASET

SEQ ID NO: 36378 - protein, 10 aa, Artificial Sequence
  Description of Artificial Sequence: Synthetic epitope
QHLQTLTQSG

SEQ ID NO: 36379 - protein, 10 aa, Artificial Sequence
  Description of Artificial Sequence: Synthetic epitope
QHLSVMLKAA

SEQ ID NO: 36380 - protein, 10 aa, Artificial Sequence
  Description of Artificial Sequence: Synthetic epitope
QHLYVTLRTI

SEQ ID NO: 36381 - protein, 10 aa, Artificial Sequence
  Description of Artificial Sequence: Synthetic epitope
QHMELQLIKK

SEQ ID NO: 36382 - protein, 10 aa, Artificial Sequence
  Description of Artificial Sequence: Synthetic epitope
QHMEQELKAQ

SEQ ID NO: 36383 - protein, 10 aa, Artificial Sequence
  Description of Artificial Sequence: Synthetic epitope
QHMFYSGVID

SEQ ID NO: 36384 - protein, 10 aa, Artificial Sequence
  Description of Artificial Sequence: Synthetic epitope
QHMIELFSEN

SEQ ID NO: 36385 - protein, 10 aa, Artificial Sequence
  Description of Artificial Sequence: Synthetic epitope
QHMKLSTSRD

SEQ ID NO: 36386 - protein, 10 aa, Artificial Sequence
  Description of Artificial Sequence: Synthetic epitope
QHMKWPSVSS

SEQ ID NO: 36387 - protein, 10 aa, Artificial Sequence
  Description of Artificial Sequence: Synthetic epitope
QHMMLMKAME

SEQ ID NO: 36388 - protein, 10 aa, Artificial Sequence
  Description of Artificial Sequence: Synthetic epitope
QHMNTMIKAF

SEQ ID NO: 36389 - protein, 10 aa, Artificial Sequence
  Description of Artificial Sequence: Synthetic epitope
QHMSPWDEKH

SEQ ID NO: 36390 - protein, 10 aa, Artificial Sequence
  Description of Artificial Sequence: Synthetic epitope
QHNEEQSGDE

SEQ ID NO: 36391 - protein, 10 aa, Artificial Sequence
  Description of Artificial Sequence: Synthetic epitope
QHNEIQEVGS

SEQ ID NO: 36392 - protein, 10 aa, Artificial Sequence
  Description of Artificial Sequence: Synthetic epitope
QHNPVQVQKL

SEQ ID NO: 36393 - protein, 10 aa, Artificial Sequence
  Description of Artificial Sequence: Synthetic epitope
QHPAAIAKIR

SEQ ID NO: 36394 - protein, 10 aa, Artificial Sequence
  Description of Artificial Sequence: Synthetic epitope
QHPGIKIGEP

SEQ ID NO: 36395 - protein, 10 aa, Artificial Sequence
  Description of Artificial Sequence: Synthetic epitope
QHPVQATHRG

SEQ ID NO: 36396 - protein, 10 aa, Artificial Sequence
  Description of Artificial Sequence: Synthetic epitope
QHQAHSLERV

SEQ ID NO: 36397 - protein, 10 aa, Artificial Sequence
  Description of Artificial Sequence: Synthetic epitope
QHQAQLSLGA

SEQ ID NO: 36398 - protein, 10 aa, Artificial Sequence
  Description of Artificial Sequence: Synthetic epitope
QHQDALQISD

SEQ ID NO: 36399 - protein, 10 aa, Artificial Sequence
  Description of Artificial Sequence: Synthetic epitope
QHQDRGETFQ

SEQ ID NO: 36400 - protein, 10 aa, Artificial Sequence
  Description of Artificial Sequence: Synthetic epitope
QHQGLSAVAT

SEQ ID NO: 36401 - protein, 10 aa, Artificial Sequence
  Description of Artificial Sequence: Synthetic epitope
QHQHVVNSAP

SEQ ID NO: 36402 - protein, 10 aa, Artificial Sequence
  Description of Artificial Sequence: Synthetic epitope
QHQINGRVRQ

SEQ ID NO: 36403 - protein, 10 aa, Artificial Sequence
  Description of Artificial Sequence: Synthetic epitope
QHQLDKTKQQ

SEQ ID NO: 36404 - protein, 10 aa, Artificial Sequence
  Description of Artificial Sequence: Synthetic epitope
QHQLRIQDQE

SEQ ID NO: 36405 - protein, 10 aa, Artificial Sequence
  Description of Artificial Sequence: Synthetic epitope
QHQLSIQRIA

SEQ ID NO: 36406 - protein, 10 aa, Artificial Sequence
  Description of Artificial Sequence: Synthetic epitope
QHQLSISPDI

SEQ ID NO: 36407 - protein, 10 aa, Artificial Sequence
  Description of Artificial Sequence: Synthetic epitope
QHQNSSVISR

SEQ ID NO: 36408 - protein, 10 aa, Artificial Sequence
  Description of Artificial Sequence: Synthetic epitope
QHQPKDFTQA

SEQ ID NO: 36409 - protein, 10 aa, Artificial Sequence
  Description of Artificial Sequence: Synthetic epitope
QHQQMEQGAR

SEQ ID NO: 36410 - protein, 10 aa, Artificial Sequence
  Description of Artificial Sequence: Synthetic epitope
QHQQVRQIRK

SEQ ID NO: 36411 - protein, 10 aa, Artificial Sequence
  Description of Artificial Sequence: Synthetic epitope
QHQSPHLLGQ

SEQ ID NO: 36412 - protein, 10 aa, Artificial Sequence
  Description of Artificial Sequence: Synthetic epitope
QHQSQAVTVP

SEQ ID NO: 36413 - protein, 10 aa, Artificial Sequence
  Description of Artificial Sequence: Synthetic epitope
QHRDHIVGVT

SEQ ID NO: 36414 - protein, 10 aa, Artificial Sequence
  Description of Artificial Sequence: Synthetic epitope
QHRELDLKIA

SEQ ID NO: 36415 - protein, 10 aa, Artificial Sequence
  Description of Artificial Sequence: Synthetic epitope
QHRFKTSLQI

SEQ ID NO: 36416 - protein, 10 aa, Artificial Sequence
  Description of Artificial Sequence: Synthetic epitope
QHRKSTLVDN

SEQ ID NO: 36417 - protein, 10 aa, Artificial Sequence
  Description of Artificial Sequence: Synthetic epitope
QHRRTKQPQE

SEQ ID NO: 36418 - protein, 10 aa, Artificial Sequence
  Description of Artificial Sequence: Synthetic epitope
QHRTRAVIAP

SEQ ID NO: 36419 - protein, 10 aa, Artificial Sequence
  Description of Artificial Sequence: Synthetic epitope
QHRTVIADQF

SEQ ID NO: 36420 - protein, 10 aa, Artificial Sequence
  Description of Artificial Sequence: Synthetic epitope
QHRVEKMPDG

SEQ ID NO: 36421 - protein, 10 aa, Artificial Sequence
  Description of Artificial Sequence: Synthetic epitope
QHSASQQHSA

SEQ ID NO: 36422 - protein, 10 aa, Artificial Sequence
  Description of Artificial Sequence: Synthetic epitope
QHSHESVRRD

SEQ ID NO: 36423 - protein, 10 aa, Artificial Sequence
  Description of Artificial Sequence: Synthetic epitope
QHSKLTDREK

SEQ ID NO: 36424 - protein, 10 aa, Artificial Sequence
  Description of Artificial Sequence: Synthetic epitope
QHSLGLVETI

SEQ ID NO: 36425 - protein, 10 aa, Artificial Sequence
  Description of Artificial Sequence: Synthetic epitope
QHSLVSQLRR

SEQ ID NO: 36426 - protein, 10 aa, Artificial Sequence
  Description of Artificial Sequence: Synthetic epitope
QHSMVESTAV

SEQ ID NO: 36427 - protein, 10 aa, Artificial Sequence
  Description of Artificial Sequence: Synthetic epitope
QHSQDSSLNQ

SEQ ID NO: 36428 - protein, 10 aa, Artificial Sequence
  Description of Artificial Sequence: Synthetic epitope
QHSQHAKQSS

SEQ ID NO: 36429 - protein, 10 aa, Artificial Sequence
  Description of Artificial Sequence: Synthetic epitope
QHSQLKTRGD

SEQ ID NO: 36430 - protein, 10 aa, Artificial Sequence
  Description of Artificial Sequence: Synthetic epitope
QHSRRTQYFY

SEQ ID NO: 36431 - protein, 10 aa, Artificial Sequence
  Description of Artificial Sequence: Synthetic epitope
QHSSDSFDDA

SEQ ID NO: 36432 - protein, 10 aa, Artificial Sequence
  Description of Artificial Sequence: Synthetic epitope
QHSSGAQSAA

SEQ ID NO: 36433 - protein, 10 aa, Artificial Sequence
  Description of Artificial Sequence: Synthetic epitope
QHSSVNSLRT

SEQ ID NO: 36434 - protein, 10 aa, Artificial Sequence
  Description of Artificial Sequence: Synthetic epitope
QHSTNTKIQI

SEQ ID NO: 36435 - protein, 10 aa, Artificial Sequence
  Description of Artificial Sequence: Synthetic epitope
QHSTSILRKQ

SEQ ID NO: 36436 - protein, 10 aa, Artificial Sequence
  Description of Artificial Sequence: Synthetic epitope
QHTASKSKKE

SEQ ID NO: 36437 - protein, 10 aa, Artificial Sequence
  Description of Artificial Sequence: Synthetic epitope
QHTELARSVE

SEQ ID NO: 36438 - protein, 10 aa, Artificial Sequence
  Description of Artificial Sequence: Synthetic epitope
QHTHQHQHTF

SEQ ID NO: 36439 - protein, 10 aa, Artificial Sequence
  Description of Artificial Sequence: Synthetic epitope
QHTLDIKELQ

SEQ ID NO: 36440 - protein, 10 aa, Artificial Sequence
  Description of Artificial Sequence: Synthetic epitope
QHTLQTFQGM

SEQ ID NO: 36441 - protein, 10 aa, Artificial Sequence
  Description of Artificial Sequence: Synthetic epitope
QHVAQIRQLE

SEQ ID NO: 36442 - protein, 10 aa, Artificial Sequence
  Description of Artificial Sequence: Synthetic epitope
QHVEEKAVHS

SEQ ID NO: 36443 - protein, 10 aa, Artificial Sequence
  Description of Artificial Sequence: Synthetic epitope
QHVKHFNDVV

SEQ ID NO: 36444 - protein, 10 aa, Artificial Sequence
  Description of Artificial Sequence: Synthetic epitope
QHVLQIFLGL

SEQ ID NO: 36445 - protein, 10 aa, Artificial Sequence
  Description of Artificial Sequence: Synthetic epitope
QHVSRITQED

SEQ ID NO: 36446 - protein, 10 aa, Artificial Sequence
  Description of Artificial Sequence: Synthetic epitope
QHVTTQLVLR

SEQ ID NO: 36447 - protein, 10 aa, Artificial Sequence
  Description of Artificial Sequence: Synthetic epitope
QHVVMTAIQE

SEQ ID NO: 36448 - protein, 10 aa, Artificial Sequence
  Description of Artificial Sequence: Synthetic epitope
QHWAAMAQQV

SEQ ID NO: 36449 - protein, 10 aa, Artificial Sequence
  Description of Artificial Sequence: Synthetic epitope
QHWAAMAQQV

SEQ ID NO: 36450 - protein, 10 aa, Artificial Sequence
  Description of Artificial Sequence: Synthetic epitope
QHWKSEDLAY

SEQ ID NO: 36451 - protein, 10 aa, Artificial Sequence
  Description of Artificial Sequence: Synthetic epitope
QHWQPENVNQ

SEQ ID NO: 36452 - protein, 10 aa, Artificial Sequence
  Description of Artificial Sequence: Synthetic epitope
QHYMAYWMGH

SEQ ID NO: 36453 - protein, 10 aa, Artificial Sequence
  Description of Artificial Sequence: Synthetic epitope
QIAAQKSSLG

SEQ ID NO: 36454 - protein, 10 aa, Artificial Sequence
  Description of Artificial Sequence: Synthetic epitope
QIAASEKLAQ

SEQ ID NO: 36455 - protein, 10 aa, Artificial Sequence
  Description of Artificial Sequence: Synthetic epitope
QIAEETNNPT

SEQ ID NO: 36456 - protein, 10 aa, Artificial Sequence
  Description of Artificial Sequence: Synthetic epitope
QIAEPFQYPQ

SEQ ID NO: 36457 - protein, 10 aa, Artificial Sequence
  Description of Artificial Sequence: Synthetic epitope
QIAKMSSEVE

SEQ ID NO: 36458 - protein, 10 aa, Artificial Sequence
  Description of Artificial Sequence: Synthetic epitope
QIASATMPAL

SEQ ID NO: 36459 - protein, 10 aa, Artificial Sequence
  Description of Artificial Sequence: Synthetic epitope
QIASKQAENG

SEQ ID NO: 36460 - protein, 10 aa, Artificial Sequence
  Description of Artificial Sequence: Synthetic epitope
QIDGKKSKQQ

SEQ ID NO: 36461 - protein, 10 aa, Artificial Sequence
  Description of Artificial Sequence: Synthetic epitope
QIDNRAVLEL

SEQ ID NO: 36462 - protein, 10 aa, Artificial Sequence
  Description of Artificial Sequence: Synthetic epitope
QIDTRSGFSA

SEQ ID NO: 36463 - protein, 10 aa, Artificial Sequence
  Description of Artificial Sequence: Synthetic epitope
QIEHQVLSSE

SEQ ID NO: 36464 - protein, 10 aa, Artificial Sequence
  Description of Artificial Sequence: Synthetic epitope
QIETVLSTRI

SEQ ID NO: 36465 - protein, 10 aa, Artificial Sequence
  Description of Artificial Sequence: Synthetic epitope
QIFDEAALEV

SEQ ID NO: 36466 - protein, 10 aa, Artificial Sequence
  Description of Artificial Sequence: Synthetic epitope
QIFQSRVIKE

SEQ ID NO: 36467 - protein, 10 aa, Artificial Sequence
  Description of Artificial Sequence: Synthetic epitope
QIFRSIKVFT

SEQ ID NO: 36468 - protein, 10 aa, Artificial Sequence
  Description of Artificial Sequence: Synthetic epitope
QIFSESSALK

SEQ ID NO: 36469 - protein, 10 aa, Artificial Sequence
  Description of Artificial Sequence: Synthetic epitope
QIFTNTVARF

SEQ ID NO: 36470 - protein, 10 aa, Artificial Sequence
  Description of Artificial Sequence: Synthetic epitope
QIFWNFYSKL

SEQ ID NO: 36471 - protein, 10 aa, Artificial Sequence
  Description of Artificial Sequence: Synthetic epitope
QIGAADKPRD

SEQ ID NO: 36472 - protein, 10 aa, Artificial Sequence
  Description of Artificial Sequence: Synthetic epitope
QIGDKDQKIQ

SEQ ID NO: 36473 - protein, 10 aa, Artificial Sequence
  Description of Artificial Sequence: Synthetic epitope
QIGPVKEDSD

SEQ ID NO: 36474 - protein, 10 aa, Artificial Sequence
  Description of Artificial Sequence: Synthetic epitope
QIGSAKAKEL

SEQ ID NO: 36475 - protein, 10 aa, Artificial Sequence
  Description of Artificial Sequence: Synthetic epitope
QIHEGASLPF

SEQ ID NO: 36476 - protein, 10 aa, Artificial Sequence
  Description of Artificial Sequence: Synthetic epitope
QIHGAFAKKG

SEQ ID NO: 36477 - protein, 10 aa, Artificial Sequence
  Description of Artificial Sequence: Synthetic epitope
QIHKTHNSKN

SEQ ID NO: 36478 - protein, 10 aa, Artificial Sequence
  Description of Artificial Sequence: Synthetic epitope
QIHTDAAKEN

SEQ ID NO: 36479 - protein, 10 aa, Artificial Sequence
  Description of Artificial Sequence: Synthetic epitope
QIHYDHQNDG

SEQ ID NO: 36480 - protein, 10 aa, Artificial Sequence
  Description of Artificial Sequence: Synthetic epitope
QIIALKLLPL

SEQ ID NO: 36481 - protein, 10 aa, Artificial Sequence
  Description of Artificial Sequence: Synthetic epitope
QIIDDEPQAQ

SEQ ID NO: 36482 - protein, 10 aa, Artificial Sequence
  Description of Artificial Sequence: Synthetic epitope
QIIDKRMSHQ

SEQ ID NO: 36483 - protein, 10 aa, Artificial Sequence
  Description of Artificial Sequence: Synthetic epitope
QIIKLKPTDV

SEQ ID NO: 36484 - protein, 10 aa, Artificial Sequence
  Description of Artificial Sequence: Synthetic epitope
QIIRSSKEKT

SEQ ID NO: 36485 - protein, 10 aa, Artificial Sequence
  Description of Artificial Sequence: Synthetic epitope
QIISGIVNLE

SEQ ID NO: 36486 - protein, 10 aa, Artificial Sequence
  Description of Artificial Sequence: Synthetic epitope
QIITAVTSLS

SEQ ID NO: 36487 - protein, 10 aa, Artificial Sequence
  Description of Artificial Sequence: Synthetic epitope
QIITKASHEH

SEQ ID NO: 36488 - protein, 10 aa, Artificial Sequence
  Description of Artificial Sequence: Synthetic epitope
QIIVDLVEQQ

SEQ ID NO: 36489 - protein, 10 aa, Artificial Sequence
  Description of Artificial Sequence: Synthetic epitope
QIKALNRGLK

SEQ ID NO: 36490 - protein, 10 aa, Artificial Sequence
  Description of Artificial Sequence: Synthetic epitope
QIKGLFQKEQ

SEQ ID NO: 36491 - protein, 10 aa, Artificial Sequence
  Description of Artificial Sequence: Synthetic epitope
QIKIDAHLNK

SEQ ID NO: 36492 - protein, 10 aa, Artificial Sequence
  Description of Artificial Sequence: Synthetic epitope
QIKIEENATG

SEQ ID NO: 36493 - protein, 10 aa, Artificial Sequence
  Description of Artificial Sequence: Synthetic epitope
QIKIISAGHK

SEQ ID NO: 36494 - protein, 10 aa, Artificial Sequence
  Description of Artificial Sequence: Synthetic epitope
QIKILESDES

SEQ ID NO: 36495 - protein, 10 aa, Artificial Sequence
  Description of Artificial Sequence: Synthetic epitope
QIKKTKLDRQ

SEQ ID NO: 36496 - protein, 10 aa, Artificial Sequence
  Description of Artificial Sequence: Synthetic epitope
QIKNVEDMVQ

SEQ ID NO: 36497 - protein, 10 aa, Artificial Sequence
  Description of Artificial Sequence: Synthetic epitope
QIKPINDTHS

SEQ ID NO: 36498 - protein, 10 aa, Artificial Sequence
  Description of Artificial Sequence: Synthetic epitope
QIKQGFIVVK

SEQ ID NO: 36499 - protein, 10 aa, Artificial Sequence
  Description of Artificial Sequence: Synthetic epitope
QIKQRERKNN

SEQ ID NO: 36500 - protein, 10 aa, Artificial Sequence
  Description of Artificial Sequence: Synthetic epitope
QIKSHEYNER

SEQ ID NO: 36501 - protein, 10 aa, Artificial Sequence
  Description of Artificial Sequence: Synthetic epitope
QIKSYPLQDF

SEQ ID NO: 36502 - protein, 10 aa, Artificial Sequence
  Description of Artificial Sequence: Synthetic epitope
QIKTIRPNSA

SEQ ID NO: 36503 - protein, 10 aa, Artificial Sequence
  Description of Artificial Sequence: Synthetic epitope
QIKTKDQMQM

SEQ ID NO: 36504 - protein, 10 aa, Artificial Sequence
  Description of Artificial Sequence: Synthetic epitope
QIKYPGADMD

SEQ ID NO: 36505 - protein, 10 aa, Artificial Sequence
  Description of Artificial Sequence: Synthetic epitope
QIKYQQMMEE

SEQ ID NO: 36506 - protein, 10 aa, Artificial Sequence
  Description of Artificial Sequence: Synthetic epitope
QILAKYSAAD

SEQ ID NO: 36507 - protein, 10 aa, Artificial Sequence
  Description of Artificial Sequence: Synthetic epitope
QILASTEAFS

SEQ ID NO: 36508 - protein, 10 aa, Artificial Sequence
  Description of Artificial Sequence: Synthetic epitope
QILEAAKSIA

SEQ ID NO: 36509 - protein, 10 aa, Artificial Sequence
  Description of Artificial Sequence: Synthetic epitope
QILEIVLDAS

SEQ ID NO: 36510 - protein, 10 aa, Artificial Sequence
  Description of Artificial Sequence: Synthetic epitope
QILEKQQIQK

SEQ ID NO: 36511 - protein, 10 aa, Artificial Sequence
  Description of Artificial Sequence: Synthetic epitope
QILEPVKQHI

SEQ ID NO: 36512 - protein, 10 aa, Artificial Sequence
  Description of Artificial Sequence: Synthetic epitope
QILHKQRAAK

SEQ ID NO: 36513 - protein, 10 aa, Artificial Sequence
  Description of Artificial Sequence: Synthetic epitope
QILIQWITTQ

SEQ ID NO: 36514 - protein, 10 aa, Artificial Sequence
  Description of Artificial Sequence: Synthetic epitope
QILKAVRMRT

SEQ ID NO: 36515 - protein, 10 aa, Artificial Sequence
  Description of Artificial Sequence: Synthetic epitope
QILKIVKEAG

SEQ ID NO: 36516 - protein, 10 aa, Artificial Sequence
  Description of Artificial Sequence: Synthetic epitope
QILKSNLASM

SEQ ID NO: 36517 - protein, 10 aa, Artificial Sequence
  Description of Artificial Sequence: Synthetic epitope
QILLIFLQKM

SEQ ID NO: 36518 - protein, 10 aa, Artificial Sequence
  Description of Artificial Sequence: Synthetic epitope
QILMEGGTHM

SEQ ID NO: 36519 - protein, 10 aa, Artificial Sequence
  Description of Artificial Sequence: Synthetic epitope
QILNSPDQDS

SEQ ID NO: 36520 - protein, 10 aa, Artificial Sequence
  Description of Artificial Sequence: Synthetic epitope
QILQETLTTS

SEQ ID NO: 36521 - protein, 10 aa, Artificial Sequence
  Description of Artificial Sequence: Synthetic epitope
QILQQSILQA

SEQ ID NO: 36522 - protein, 10 aa, Artificial Sequence
  Description of Artificial Sequence: Synthetic epitope
QILSFNKSGG

SEQ ID NO: 36523 - protein, 10 aa, Artificial Sequence
  Description of Artificial Sequence: Synthetic epitope
QILSSTALED

SEQ ID NO: 36524 - protein, 10 aa, Artificial Sequence
  Description of Artificial Sequence: Synthetic epitope
QILSVPKVDD

SEQ ID NO: 36525 - protein, 10 aa, Artificial Sequence
  Description of Artificial Sequence: Synthetic epitope
QILTRDPQVN

SEQ ID NO: 36526 - protein, 10 aa, Artificial Sequence
  Description of Artificial Sequence: Synthetic epitope
QILVTLPRVV

SEQ ID NO: 36527 - protein, 10 aa, Artificial Sequence
  Description of Artificial Sequence: Synthetic epitope
QIMEQKQQLL

SEQ ID NO: 36528 - protein, 10 aa, Artificial Sequence
  Description of Artificial Sequence: Synthetic epitope
QIMESQAEAF

SEQ ID NO: 36529 - protein, 10 aa, Artificial Sequence
  Description of Artificial Sequence: Synthetic epitope
QIMIKEKEEM

SEQ ID NO: 36530 - protein, 10 aa, Artificial Sequence
  Description of Artificial Sequence: Synthetic epitope
QIMLDKGKLW

SEQ ID NO: 36531 - protein, 10 aa, Artificial Sequence
  Description of Artificial Sequence: Synthetic epitope
QIMQGAHSDF

SEQ ID NO: 36532 - protein, 10 aa, Artificial Sequence
  Description of Artificial Sequence: Synthetic epitope
QIMSNSENAI

SEQ ID NO: 36533 - protein, 10 aa, Artificial Sequence
  Description of Artificial Sequence: Synthetic epitope
QIMSQILSAL

SEQ ID NO: 36534 - protein, 10 aa, Artificial Sequence
  Description of Artificial Sequence: Synthetic epitope
QINAEFVTQL

SEQ ID NO: 36535 - protein, 10 aa, Artificial Sequence
  Description of Artificial Sequence: Synthetic epitope
QINARDWSRK

SEQ ID NO: 36536 - protein, 10 aa, Artificial Sequence
  Description of Artificial Sequence: Synthetic epitope
QINDKDDTNE

SEQ ID NO: 36537 - protein, 10 aa, Artificial Sequence
  Description of Artificial Sequence: Synthetic epitope
QINKAKSRPK

SEQ ID NO: 36538 - protein, 10 aa, Artificial Sequence
  Description of Artificial Sequence: Synthetic epitope
QINLNSIVPS

SEQ ID NO: 36539 - protein, 10 aa, Artificial Sequence
  Description of Artificial Sequence: Synthetic epitope
QINNQEKSWQ

SEQ ID NO: 36540 - protein, 10 aa, Artificial Sequence
  Description of Artificial Sequence: Synthetic epitope
QINRKTPVEK

SEQ ID NO: 36541 - protein, 10 aa, Artificial Sequence
  Description of Artificial Sequence: Synthetic epitope
QINRLLSTIT

SEQ ID NO: 36542 - protein, 10 aa, Artificial Sequence
  Description of Artificial Sequence: Synthetic epitope
QINSSLVDSN

SEQ ID NO: 36543 - protein, 10 aa, Artificial Sequence
  Description of Artificial Sequence: Synthetic epitope
QINTLNTLTP

SEQ ID NO: 36544 - protein, 10 aa, Artificial Sequence
  Description of Artificial Sequence: Synthetic epitope
QIPKSEAAFK

SEQ ID NO: 36545 - protein, 10 aa, Artificial Sequence
  Description of Artificial Sequence: Synthetic epitope
QIPNTQKAKG

SEQ ID NO: 36546 - protein, 10 aa, Artificial Sequence
  Description of Artificial Sequence: Synthetic epitope
QIPSKVSVNV

SEQ ID NO: 36547 - protein, 10 aa, Artificial Sequence
  Description of Artificial Sequence: Synthetic epitope
QIPVANSTKQ

SEQ ID NO: 36548 - protein, 10 aa, Artificial Sequence
  Description of Artificial Sequence: Synthetic epitope
QIQAAFREPR

SEQ ID NO: 36549 - protein, 10 aa, Artificial Sequence
  Description of Artificial Sequence: Synthetic epitope
QIQAKTSWDP

SEQ ID NO: 36550 - protein, 10 aa, Artificial Sequence
  Description of Artificial Sequence: Synthetic epitope
QIQANMRSNK

SEQ ID NO: 36551 - protein, 10 aa, Artificial Sequence
  Description of Artificial Sequence: Synthetic epitope
QIQEAETRDQ

SEQ ID NO: 36552 - protein, 10 aa, Artificial Sequence
  Description of Artificial Sequence: Synthetic epitope
QIQESNLKSE

SEQ ID NO: 36553 - protein, 10 aa, Artificial Sequence
  Description of Artificial Sequence: Synthetic epitope
QIQESQVTSH

SEQ ID NO: 36554 - protein, 10 aa, Artificial Sequence
  Description of Artificial Sequence: Synthetic epitope
QIQLAQKLEI

SEQ ID NO: 36555 - protein, 10 aa, Artificial Sequence
  Description of Artificial Sequence: Synthetic epitope
QIQLESIKNS

SEQ ID NO: 36556 - protein, 10 aa, Artificial Sequence
  Description of Artificial Sequence: Synthetic epitope
QIQQAKSHFA

SEQ ID NO: 36557 - protein, 10 aa, Artificial Sequence
  Description of Artificial Sequence: Synthetic epitope
QIQQALKRAQ

SEQ ID NO: 36558 - protein, 10 aa, Artificial Sequence
  Description of Artificial Sequence: Synthetic epitope
QIQRRATEKE

SEQ ID NO: 36559 - protein, 10 aa, Artificial Sequence
  Description of Artificial Sequence: Synthetic epitope
QIQRVVIPVP

SEQ ID NO: 36560 - protein, 10 aa, Artificial Sequence
  Description of Artificial Sequence: Synthetic epitope
QIQSMDDVDD

SEQ ID NO: 36561 - protein, 10 aa, Artificial Sequence
  Description of Artificial Sequence: Synthetic epitope
QIQTAESKAE

SEQ ID NO: 36562 - protein, 10 aa, Artificial Sequence
  Description of Artificial Sequence: Synthetic epitope
QIQVQKKDNK

SEQ ID NO: 36563 - protein, 10 aa, Artificial Sequence
  Description of Artificial Sequence: Synthetic epitope
QIQVRESIDG

SEQ ID NO: 36564 - protein, 10 aa, Artificial Sequence
  Description of Artificial Sequence: Synthetic epitope
QIRDTVSWIF

SEQ ID NO: 36565 - protein, 10 aa, Artificial Sequence
  Description of Artificial Sequence: Synthetic epitope
QIRIRKTIPR

SEQ ID NO: 36566 - protein, 10 aa, Artificial Sequence
  Description of Artificial Sequence: Synthetic epitope
QIRKQKPVLQ

SEQ ID NO: 36567 - protein, 10 aa, Artificial Sequence
  Description of Artificial Sequence: Synthetic epitope
QIRKTSASNR

SEQ ID NO: 36568 - protein, 10 aa, Artificial Sequence
  Description of Artificial Sequence: Synthetic epitope
QIRPKSQKNR

SEQ ID NO: 36569 - protein, 10 aa, Artificial Sequence
  Description of Artificial Sequence: Synthetic epitope
QIRRKLRIEK

SEQ ID NO: 36570 - protein, 10 aa, Artificial Sequence
  Description of Artificial Sequence: Synthetic epitope
QIRSIIMREN

SEQ ID NO: 36571 - protein, 10 aa, Artificial Sequence
  Description of Artificial Sequence: Synthetic epitope
QIRTKVAGIY

SEQ ID NO: 36572 - protein, 10 aa, Artificial Sequence
  Description of Artificial Sequence: Synthetic epitope
QISAKLLSLL

SEQ ID NO: 36573 - protein, 10 aa, Artificial Sequence
  Description of Artificial Sequence: Synthetic epitope
QISASVAQQR

SEQ ID NO: 36574 - protein, 10 aa, Artificial Sequence
  Description of Artificial Sequence: Synthetic epitope
QISDRSQNAT

SEQ ID NO: 36575 - protein, 10 aa, Artificial Sequence
  Description of Artificial Sequence: Synthetic epitope
QISEAGRSSE

SEQ ID NO: 36576 - protein, 10 aa, Artificial Sequence
  Description of Artificial Sequence: Synthetic epitope
QISEQDIFEG

SEQ ID NO: 36577 - protein, 10 aa, Artificial Sequence
  Description of Artificial Sequence: Synthetic epitope
QISFNKEHEE

SEQ ID NO: 36578 - protein, 10 aa, Artificial Sequence
  Description of Artificial Sequence: Synthetic epitope
QISKVFLMEK

SEQ ID NO: 36579 - protein, 10 aa, Artificial Sequence
  Description of Artificial Sequence: Synthetic epitope
QISLSQLQHD

SEQ ID NO: 36580 - protein, 10 aa, Artificial Sequence
  Description of Artificial Sequence: Synthetic epitope
QISLSTDEEL

SEQ ID NO: 36581 - protein, 10 aa, Artificial Sequence
  Description of Artificial Sequence: Synthetic epitope
QISNIKKEKL

SEQ ID NO: 36582 - protein, 10 aa, Artificial Sequence
  Description of Artificial Sequence: Synthetic epitope
QISQDSVGNS

SEQ ID NO: 36583 - protein, 10 aa, Artificial Sequence
  Description of Artificial Sequence: Synthetic epitope
QISQETTADA

SEQ ID NO: 36584 - protein, 10 aa, Artificial Sequence
  Description of Artificial Sequence: Synthetic epitope
QISQQTQLRG

SEQ ID NO: 36585 - protein, 10 aa, Artificial Sequence
  Description of Artificial Sequence: Synthetic epitope
QISRPSAAGI

SEQ ID NO: 36586 - protein, 10 aa, Artificial Sequence
  Description of Artificial Sequence: Synthetic epitope
QISSQRNRGA

SEQ ID NO: 36587 - protein, 10 aa, Artificial Sequence
  Description of Artificial Sequence: Synthetic epitope
QISSRIQASS

SEQ ID NO: 36588 - protein, 10 aa, Artificial Sequence
  Description of Artificial Sequence: Synthetic epitope
QISSTYLESN

SEQ ID NO: 36589 - protein, 10 aa, Artificial Sequence
  Description of Artificial Sequence: Synthetic epitope
QISTAVEAQL

SEQ ID NO: 36590 - protein, 10 aa, Artificial Sequence
  Description of Artificial Sequence: Synthetic epitope
QISVKKEKVV

SEQ ID NO: 36591 - protein, 10 aa, Artificial Sequence
  Description of Artificial Sequence: Synthetic epitope
QISVLQRKGI

SEQ ID NO: 36592 - protein, 10 aa, Artificial Sequence
  Description of Artificial Sequence: Synthetic epitope
QISVNNVKAG

SEQ ID NO: 36593 - protein, 10 aa, Artificial Sequence
  Description of Artificial Sequence: Synthetic epitope
QISVRDSQRV

SEQ ID NO: 36594 - protein, 10 aa, Artificial Sequence
  Description of Artificial Sequence: Synthetic epitope
QITAENMAMS

SEQ ID NO: 36595 - protein, 10 aa, Artificial Sequence
  Description of Artificial Sequence: Synthetic epitope
QITAKMEQTK

SEQ ID NO: 36596 - protein, 10 aa, Artificial Sequence
  Description of Artificial Sequence: Synthetic epitope
QITAVGNERS

SEQ ID NO: 36597 - protein, 10 aa, Artificial Sequence
  Description of Artificial Sequence: Synthetic epitope
QITDKQLMEI

SEQ ID NO: 36598 - protein, 10 aa, Artificial Sequence
  Description of Artificial Sequence: Synthetic epitope
QITDSSLGRI

SEQ ID NO: 36599 - protein, 10 aa, Artificial Sequence
  Description of Artificial Sequence: Synthetic epitope
QITEMAAVMR

SEQ ID NO: 36600 - protein, 10 aa, Artificial Sequence
  Description of Artificial Sequence: Synthetic epitope
QITETKATQK

SEQ ID NO: 36601 - protein, 10 aa, Artificial Sequence
  Description of Artificial Sequence: Synthetic epitope
QITKQAMGSD

SEQ ID NO: 36602 - protein, 10 aa, Artificial Sequence
  Description of Artificial Sequence: Synthetic epitope
QITNANELKY

SEQ ID NO: 36603 - protein, 10 aa, Artificial Sequence
  Description of Artificial Sequence: Synthetic epitope
QITNTGFEMK

SEQ ID NO: 36604 - protein, 10 aa, Artificial Sequence
  Description of Artificial Sequence: Synthetic epitope
QITQLESLKQ

SEQ ID NO: 36605 - protein, 10 aa, Artificial Sequence
  Description of Artificial Sequence: Synthetic epitope
QITRINKTTA

SEQ ID NO: 36606 - protein, 10 aa, Artificial Sequence
  Description of Artificial Sequence: Synthetic epitope
QITSIANATT

SEQ ID NO: 36607 - protein, 10 aa, Artificial Sequence
  Description of Artificial Sequence: Synthetic epitope
QITTAIPNTV

SEQ ID NO: 36608 - protein, 10 aa, Artificial Sequence
  Description of Artificial Sequence: Synthetic epitope
QIVDEANARG

SEQ ID NO: 36609 - protein, 10 aa, Artificial Sequence
  Description of Artificial Sequence: Synthetic epitope
QIVDNTVSRQ

SEQ ID NO: 36610 - protein, 10 aa, Artificial Sequence
  Description of Artificial Sequence: Synthetic epitope
QIVESKMKTS

SEQ ID NO: 36611 - protein, 10 aa, Artificial Sequence
  Description of Artificial Sequence: Synthetic epitope
QIVISSARAG

SEQ ID NO: 36612 - protein, 10 aa, Artificial Sequence
  Description of Artificial Sequence: Synthetic epitope
QIVKMKTNET

SEQ ID NO: 36613 - protein, 10 aa, Artificial Sequence
  Description of Artificial Sequence: Synthetic epitope
QIVQAKINAQ

SEQ ID NO: 36614 - protein, 10 aa, Artificial Sequence
  Description of Artificial Sequence: Synthetic epitope
QIVQDKTSVS

SEQ ID NO: 36615 - protein, 10 aa, Artificial Sequence
  Description of Artificial Sequence: Synthetic epitope
QIVQSAFASS

SEQ ID NO: 36616 - protein, 10 aa, Artificial Sequence
  Description of Artificial Sequence: Synthetic epitope
QIVSSQNGLS

SEQ ID NO: 36617 - protein, 10 aa, Artificial Sequence
  Description of Artificial Sequence: Synthetic epitope
QIVSVMSSRR

SEQ ID NO: 36618 - protein, 10 aa, Artificial Sequence
  Description of Artificial Sequence: Synthetic epitope
QIVTKQTGNE

SEQ ID NO: 36619 - protein, 10 aa, Artificial Sequence
  Description of Artificial Sequence: Synthetic epitope
QIYQSIEFSR

SEQ ID NO: 36620 - protein, 10 aa, Artificial Sequence
  Description of Artificial Sequence: Synthetic epitope
QKAALRYERA

SEQ ID NO: 36621 - protein, 10 aa, Artificial Sequence
  Description of Artificial Sequence: Synthetic epitope
QKAAQQAASS

SEQ ID NO: 36622 - protein, 10 aa, Artificial Sequence
  Description of Artificial Sequence: Synthetic epitope
QKAAQQAASS

SEQ ID NO: 36623 - protein, 10 aa, Artificial Sequence
  Description of Artificial Sequence: Synthetic epitope
QKAARNMSYQ

SEQ ID NO: 36624 - protein, 10 aa, Artificial Sequence
  Description of Artificial Sequence: Synthetic epitope
QKAATQLRGH

SEQ ID NO: 36625 - protein, 10 aa, Artificial Sequence
  Description of Artificial Sequence: Synthetic epitope
QKAAYVVELA

SEQ ID NO: 36626 - protein, 10 aa, Artificial Sequence
  Description of Artificial Sequence: Synthetic epitope
QKAEALDGAH

SEQ ID NO: 36627 - protein, 10 aa, Artificial Sequence
  Description of Artificial Sequence: Synthetic epitope
QKAEAMAQSG

SEQ ID NO: 36628 - protein, 10 aa, Artificial Sequence
  Description of Artificial Sequence: Synthetic epitope
QKAEFSDQKH

SEQ ID NO: 36629 - protein, 10 aa, Artificial Sequence
  Description of Artificial Sequence: Synthetic epitope
QKAESLKLEN

SEQ ID NO: 36630 - protein, 10 aa, Artificial Sequence
  Description of Artificial Sequence: Synthetic epitope
QKAIFSASID

SEQ ID NO: 36631 - protein, 10 aa, Artificial Sequence
  Description of Artificial Sequence: Synthetic epitope
QKAIMKLDIE

SEQ ID NO: 36632 - protein, 10 aa, Artificial Sequence
  Description of Artificial Sequence: Synthetic epitope
QKAIQETVEK

SEQ ID NO: 36633 - protein, 10 aa, Artificial Sequence
  Description of Artificial Sequence: Synthetic epitope
QKAISAFRIQ

SEQ ID NO: 36634 - protein, 10 aa, Artificial Sequence
  Description of Artificial Sequence: Synthetic epitope
QKAKISTAAF

SEQ ID NO: 36635 - protein, 10 aa, Artificial Sequence
  Description of Artificial Sequence: Synthetic epitope
QKAKQAKPKD

SEQ ID NO: 36636 - protein, 10 aa, Artificial Sequence
  Description of Artificial Sequence: Synthetic epitope
QKAKQNIEGI

SEQ ID NO: 36637 - protein, 10 aa, Artificial Sequence
  Description of Artificial Sequence: Synthetic epitope
QKALGAVSKI

SEQ ID NO: 36638 - protein, 10 aa, Artificial Sequence
  Description of Artificial Sequence: Synthetic epitope
QKALKKADKQ

SEQ ID NO: 36639 - protein, 10 aa, Artificial Sequence
  Description of Artificial Sequence: Synthetic epitope
QKALSKVDIS

SEQ ID NO: 36640 - protein, 10 aa, Artificial Sequence
  Description of Artificial Sequence: Synthetic epitope
QKALSSTKDV

SEQ ID NO: 36641 - protein, 10 aa, Artificial Sequence
  Description of Artificial Sequence: Synthetic epitope
QKALVAKVSQ

SEQ ID NO: 36642 - protein, 10 aa, Artificial Sequence
  Description of Artificial Sequence: Synthetic epitope
QKAMELVTIN

SEQ ID NO: 36643 - protein, 10 aa, Artificial Sequence
  Description of Artificial Sequence: Synthetic epitope
QKAMQVDATV

SEQ ID NO: 36644 - protein, 10 aa, Artificial Sequence
  Description of Artificial Sequence: Synthetic epitope
QKANKNRAAR

SEQ ID NO: 36645 - protein, 10 aa, Artificial Sequence
  Description of Artificial Sequence: Synthetic epitope
QKAQEESSAM

SEQ ID NO: 36646 - protein, 10 aa, Artificial Sequence
  Description of Artificial Sequence: Synthetic epitope
QKAQELAVST

SEQ ID NO: 36647 - protein, 10 aa, Artificial Sequence
  Description of Artificial Sequence: Synthetic epitope
QKAQILAQKE

SEQ ID NO: 36648 - protein, 10 aa, Artificial Sequence
  Description of Artificial Sequence: Synthetic epitope
QKAQLSLEEK

SEQ ID NO: 36649 - protein, 10 aa, Artificial Sequence
  Description of Artificial Sequence: Synthetic epitope
QKAQPGVSET

SEQ ID NO: 36650 - protein, 10 aa, Artificial Sequence
  Description of Artificial Sequence: Synthetic epitope
QKAQQIHSQT

SEQ ID NO: 36651 - protein, 10 aa, Artificial Sequence
  Description of Artificial Sequence: Synthetic epitope
QKAREDIFME

SEQ ID NO: 36652 - protein, 10 aa, Artificial Sequence
  Description of Artificial Sequence: Synthetic epitope
QKASAGTAKW

SEQ ID NO: 36653 - protein, 10 aa, Artificial Sequence
  Description of Artificial Sequence: Synthetic epitope
QKASEENEIT

SEQ ID NO: 36654 - protein, 10 aa, Artificial Sequence
  Description of Artificial Sequence: Synthetic epitope
QKASQALNER

SEQ ID NO: 36655 - protein, 10 aa, Artificial Sequence
  Description of Artificial Sequence: Synthetic epitope
QKASRQEEPD

SEQ ID NO: 36656 - protein, 10 aa, Artificial Sequence
  Description of Artificial Sequence: Synthetic epitope
QKASRVTETL

SEQ ID NO: 36657 - protein, 10 aa, Artificial Sequence
  Description of Artificial Sequence: Synthetic epitope
QKASTERITS

SEQ ID NO: 36658 - protein, 10 aa, Artificial Sequence
  Description of Artificial Sequence: Synthetic epitope
QKASVKLKAR

SEQ ID NO: 36659 - protein, 10 aa, Artificial Sequence
  Description of Artificial Sequence: Synthetic epitope
QKASVSQTSP

SEQ ID NO: 36660 - protein, 10 aa, Artificial Sequence
  Description of Artificial Sequence: Synthetic epitope
QKATETEFIK

SEQ ID NO: 36661 - protein, 10 aa, Artificial Sequence
  Description of Artificial Sequence: Synthetic epitope
QKATHVVQSE

SEQ ID NO: 36662 - protein, 10 aa, Artificial Sequence
  Description of Artificial Sequence: Synthetic epitope
QKATKKGEQE

SEQ ID NO: 36663 - protein, 10 aa, Artificial Sequence
  Description of Artificial Sequence: Synthetic epitope
QKATTGRSSR

SEQ ID NO: 36664 - protein, 10 aa, Artificial Sequence
  Description of Artificial Sequence: Synthetic epitope
QKAVDQSIEK

SEQ ID NO: 36665 - protein, 10 aa, Artificial Sequence
  Description of Artificial Sequence: Synthetic epitope
QKAVLIAEST

SEQ ID NO: 36666 - protein, 10 aa, Artificial Sequence
  Description of Artificial Sequence: Synthetic epitope
QKAVTAIMTR

SEQ ID NO: 36667 - protein, 10 aa, Artificial Sequence
  Description of Artificial Sequence: Synthetic epitope
QKAVVSRKTN

SEQ ID NO: 36668 - protein, 10 aa, Artificial Sequence
  Description of Artificial Sequence: Synthetic epitope
QKDAEQESQM

SEQ ID NO: 36669 - protein, 10 aa, Artificial Sequence
  Description of Artificial Sequence: Synthetic epitope
QKDDIKPKYK

SEQ ID NO: 36670 - protein, 10 aa, Artificial Sequence
  Description of Artificial Sequence: Synthetic epitope
QKDEELSAQL

SEQ ID NO: 36671 - protein, 10 aa, Artificial Sequence
  Description of Artificial Sequence: Synthetic epitope
QKDEKITQQE

SEQ ID NO: 36672 - protein, 10 aa, Artificial Sequence
  Description of Artificial Sequence: Synthetic epitope
QKDFQKGPRL

SEQ ID NO: 36673 - protein, 10 aa, Artificial Sequence
  Description of Artificial Sequence: Synthetic epitope
QKDGEKEKTE

SEQ ID NO: 36674 - protein, 10 aa, Artificial Sequence
  Description of Artificial Sequence: Synthetic epitope
QKDGISKSAG

SEQ ID NO: 36675 - protein, 10 aa, Artificial Sequence
  Description of Artificial Sequence: Synthetic epitope
QKDIEGSRKR

SEQ ID NO: 36676 - protein, 10 aa, Artificial Sequence
  Description of Artificial Sequence: Synthetic epitope
QKDILAKDEQ

SEQ ID NO: 36677 - protein, 10 aa, Artificial Sequence
  Description of Artificial Sequence: Synthetic epitope
QKDINKNMLQ

SEQ ID NO: 36678 - protein, 10 aa, Artificial Sequence
  Description of Artificial Sequence: Synthetic epitope
QKDLERRQME

SEQ ID NO: 36679 - protein, 10 aa, Artificial Sequence
  Description of Artificial Sequence: Synthetic epitope
QKDLGYLQQW

SEQ ID NO: 36680 - protein, 10 aa, Artificial Sequence
  Description of Artificial Sequence: Synthetic epitope
QKDLSLSEDV

SEQ ID NO: 36681 - protein, 10 aa, Artificial Sequence
  Description of Artificial Sequence: Synthetic epitope
QKDPKKLRSF

SEQ ID NO: 36682 - protein, 10 aa, Artificial Sequence
  Description of Artificial Sequence: Synthetic epitope
QKDQALQTQP

SEQ ID NO: 36683 - protein, 10 aa, Artificial Sequence
  Description of Artificial Sequence: Synthetic epitope
QKDQSRLKEI

SEQ ID NO: 36684 - protein, 10 aa, Artificial Sequence
  Description of Artificial Sequence: Synthetic epitope
QKDRQVTDNQ

SEQ ID NO: 36685 - protein, 10 aa, Artificial Sequence
  Description of Artificial Sequence: Synthetic epitope
QKDSFESILR

SEQ ID NO: 36686 - protein, 10 aa, Artificial Sequence
  Description of Artificial Sequence: Synthetic epitope
QKDSIQLDED

SEQ ID NO: 36687 - protein, 10 aa, Artificial Sequence
  Description of Artificial Sequence: Synthetic epitope
QKDTADSSAA

SEQ ID NO: 36688 - protein, 10 aa, Artificial Sequence
  Description of Artificial Sequence: Synthetic epitope
QKDTEPTNFK

SEQ ID NO: 36689 - protein, 10 aa, Artificial Sequence
  Description of Artificial Sequence: Synthetic epitope
QKDTIYKSEE

SEQ ID NO: 36690 - protein, 10 aa, Artificial Sequence
  Description of Artificial Sequence: Synthetic epitope
QKDTLGNTQI

SEQ ID NO: 36691 - protein, 10 aa, Artificial Sequence
  Description of Artificial Sequence: Synthetic epitope
QKDYQASEDK

SEQ ID NO: 36692 - protein, 10 aa, Artificial Sequence
  Description of Artificial Sequence: Synthetic epitope
QKDYSYYLDN

SEQ ID NO: 36693 - protein, 10 aa, Artificial Sequence
  Description of Artificial Sequence: Synthetic epitope
QKDYVTVQLQ

SEQ ID NO: 36694 - protein, 10 aa, Artificial Sequence
  Description of Artificial Sequence: Synthetic epitope
QKEAEKAVHQ

SEQ ID NO: 36695 - protein, 10 aa, Artificial Sequence
  Description of Artificial Sequence: Synthetic epitope
QKEAGVLSVL

SEQ ID NO: 36696 - protein, 10 aa, Artificial Sequence
  Description of Artificial Sequence: Synthetic epitope
QKEANDSDVQ

SEQ ID NO: 36697 - protein, 10 aa, Artificial Sequence
  Description of Artificial Sequence: Synthetic epitope
QKEANSRAPT

SEQ ID NO: 36698 - protein, 10 aa, Artificial Sequence
  Description of Artificial Sequence: Synthetic epitope
QKEARTLQEP

SEQ ID NO: 36699 - protein, 10 aa, Artificial Sequence
  Description of Artificial Sequence: Synthetic epitope
QKEAVVSQGE

SEQ ID NO: 36700 - protein, 10 aa, Artificial Sequence
  Description of Artificial Sequence: Synthetic epitope
QKEESAASGG

SEQ ID NO: 36701 - protein, 10 aa, Artificial Sequence
  Description of Artificial Sequence: Synthetic epitope
QKEESVISLQ

SEQ ID NO: 36702 - protein, 10 aa, Artificial Sequence
  Description of Artificial Sequence: Synthetic epitope
QKEIIKKLIE

SEQ ID NO: 36703 - protein, 10 aa, Artificial Sequence
  Description of Artificial Sequence: Synthetic epitope
QKEKEDAQEV

SEQ ID NO: 36704 - protein, 10 aa, Artificial Sequence
  Description of Artificial Sequence: Synthetic epitope
QKEKLIKRQE

SEQ ID NO: 36705 - protein, 10 aa, Artificial Sequence
  Description of Artificial Sequence: Synthetic epitope
QKELADASQQ

SEQ ID NO: 36706 - protein, 10 aa, Artificial Sequence
  Description of Artificial Sequence: Synthetic epitope
QKELNGAEVS

SEQ ID NO: 36707 - protein, 10 aa, Artificial Sequence
  Description of Artificial Sequence: Synthetic epitope
QKELSASASS

SEQ ID NO: 36708 - protein, 10 aa, Artificial Sequence
  Description of Artificial Sequence: Synthetic epitope
QKENINQKPV

SEQ ID NO: 36709 - protein, 10 aa, Artificial Sequence
  Description of Artificial Sequence: Synthetic epitope
QKENLKLSSE

SEQ ID NO: 36710 - protein, 10 aa, Artificial Sequence
  Description of Artificial Sequence: Synthetic epitope
QKENQIDQNS

SEQ ID NO: 36711 - protein, 10 aa, Artificial Sequence
  Description of Artificial Sequence: Synthetic epitope
QKEPRKYENA

SEQ ID NO: 36712 - protein, 10 aa, Artificial Sequence
  Description of Artificial Sequence: Synthetic epitope
QKEQASIDRL

SEQ ID NO: 36713 - protein, 10 aa, Artificial Sequence
  Description of Artificial Sequence: Synthetic epitope
QKEQLEAEAQ

SEQ ID NO: 36714 - protein, 10 aa, Artificial Sequence
  Description of Artificial Sequence: Synthetic epitope
QKEQSELVAQ

SEQ ID NO: 36715 - protein, 10 aa, Artificial Sequence
  Description of Artificial Sequence: Synthetic epitope
QKEQSKRTVN

SEQ ID NO: 36716 - protein, 10 aa, Artificial Sequence
  Description of Artificial Sequence: Synthetic epitope
QKERESEESK

SEQ ID NO: 36717 - protein, 10 aa, Artificial Sequence
  Description of Artificial Sequence: Synthetic epitope
QKERLESKEL

SEQ ID NO: 36718 - protein, 10 aa, Artificial Sequence
  Description of Artificial Sequence: Synthetic epitope
QKESAVQRSK

SEQ ID NO: 36719 - protein, 10 aa, Artificial Sequence
  Description of Artificial Sequence: Synthetic epitope
QKESTLTRTN

SEQ ID NO: 36720 - protein, 10 aa, Artificial Sequence
  Description of Artificial Sequence: Synthetic epitope
QKESVFQSGA

SEQ ID NO: 36721 - protein, 10 aa, Artificial Sequence
  Description of Artificial Sequence: Synthetic epitope
QKETHKTKEE

SEQ ID NO: 36722 - protein, 10 aa, Artificial Sequence
  Description of Artificial Sequence: Synthetic epitope
QKETQIFVEK

SEQ ID NO: 36723 - protein, 10 aa, Artificial Sequence
  Description of Artificial Sequence: Synthetic epitope
QKEVEQQTGL

SEQ ID NO: 36724 - protein, 10 aa, Artificial Sequence
  Description of Artificial Sequence: Synthetic epitope
QKEVETHANN

SEQ ID NO: 36725 - protein, 10 aa, Artificial Sequence
  Description of Artificial Sequence: Synthetic epitope
QKEVRAMSQD

SEQ ID NO: 36726 - protein, 10 aa, Artificial Sequence
  Description of Artificial Sequence: Synthetic epitope
QKEVREKEDF

SEQ ID NO: 36727 - protein, 10 aa, Artificial Sequence
  Description of Artificial Sequence: Synthetic epitope
QKFEKDQIID

SEQ ID NO: 36728 - protein, 10 aa, Artificial Sequence
  Description of Artificial Sequence: Synthetic epitope
QKFEVSSVAD

SEQ ID NO: 36729 - protein, 10 aa, Artificial Sequence
  Description of Artificial Sequence: Synthetic epitope
QKFGKVRSSV

SEQ ID NO: 36730 - protein, 10 aa, Artificial Sequence
  Description of Artificial Sequence: Synthetic epitope
QKFKNEVNTL

SEQ ID NO: 36731 - protein, 10 aa, Artificial Sequence
  Description of Artificial Sequence: Synthetic epitope
QKFKQAKKGL

SEQ ID NO: 36732 - protein, 10 aa, Artificial Sequence
  Description of Artificial Sequence: Synthetic epitope
QKFMEKSKNQ

SEQ ID NO: 36733 - protein, 10 aa, Artificial Sequence
  Description of Artificial Sequence: Synthetic epitope
QKFSMEKVES

SEQ ID NO: 36734 - protein, 10 aa, Artificial Sequence
  Description of Artificial Sequence: Synthetic epitope
QKFVNMKTQG

SEQ ID NO: 36735 - protein, 10 aa, Artificial Sequence
  Description of Artificial Sequence: Synthetic epitope
QKFVTVPSSN

SEQ ID NO: 36736 - protein, 10 aa, Artificial Sequence
  Description of Artificial Sequence: Synthetic epitope
QKGDSTSDAE

SEQ ID NO: 36737 - protein, 10 aa, Artificial Sequence
  Description of Artificial Sequence: Synthetic epitope
QKGEETEKQS

SEQ ID NO: 36738 - protein, 10 aa, Artificial Sequence
  Description of Artificial Sequence: Synthetic epitope
QKGEGGMKGE

SEQ ID NO: 36739 - protein, 10 aa, Artificial Sequence
  Description of Artificial Sequence: Synthetic epitope
QKGEQQIQKA

SEQ ID NO: 36740 - protein, 10 aa, Artificial Sequence
  Description of Artificial Sequence: Synthetic epitope
QKGGEAEKQT

SEQ ID NO: 36741 - protein, 10 aa, Artificial Sequence
  Description of Artificial Sequence: Synthetic epitope
QKGKQQAQVP

SEQ ID NO: 36742 - protein, 10 aa, Artificial Sequence
  Description of Artificial Sequence: Synthetic epitope
QKGKQQTESK

SEQ ID NO: 36743 - protein, 10 aa, Artificial Sequence
  Description of Artificial Sequence: Synthetic epitope
QKGLTGQAEA

SEQ ID NO: 36744 - protein, 10 aa, Artificial Sequence
  Description of Artificial Sequence: Synthetic epitope
QKGNDESESD

SEQ ID NO: 36745 - protein, 10 aa, Artificial Sequence
  Description of Artificial Sequence: Synthetic epitope
QKGNIVVQWK

SEQ ID NO: 36746 - protein, 10 aa, Artificial Sequence
  Description of Artificial Sequence: Synthetic epitope
QKGQYMRTLR

SEQ ID NO: 36747 - protein, 10 aa, Artificial Sequence
  Description of Artificial Sequence: Synthetic epitope
QKGRSSKKTK

SEQ ID NO: 36748 - protein, 10 aa, Artificial Sequence
  Description of Artificial Sequence: Synthetic epitope
QKGTVAGLSS

SEQ ID NO: 36749 - protein, 10 aa, Artificial Sequence
  Description of Artificial Sequence: Synthetic epitope
QKGYQSVTLL

SEQ ID NO: 36750 - protein, 10 aa, Artificial Sequence
  Description of Artificial Sequence: Synthetic epitope
QKHAAQVRQQ

SEQ ID NO: 36751 - protein, 10 aa, Artificial Sequence
  Description of Artificial Sequence: Synthetic epitope
QKHANKMDVP

SEQ ID NO: 36752 - protein, 10 aa, Artificial Sequence
  Description of Artificial Sequence: Synthetic epitope
QKHPRIRFHT

SEQ ID NO: 36753 - protein, 10 aa, Artificial Sequence
  Description of Artificial Sequence: Synthetic epitope
QKHQETAEKT

SEQ ID NO: 36754 - protein, 10 aa, Artificial Sequence
  Description of Artificial Sequence: Synthetic epitope
QKHQKVPTAV

SEQ ID NO: 36755 - protein, 10 aa, Artificial Sequence
  Description of Artificial Sequence: Synthetic epitope
QKHQSETALK

SEQ ID NO: 36756 - protein, 10 aa, Artificial Sequence
  Description of Artificial Sequence: Synthetic epitope
QKHQSLEAEV

SEQ ID NO: 36757 - protein, 10 aa, Artificial Sequence
  Description of Artificial Sequence: Synthetic epitope
QKHTEDREEG

SEQ ID NO: 36758 - protein, 10 aa, Artificial Sequence
  Description of Artificial Sequence: Synthetic epitope
QKHTKLAKLA

SEQ ID NO: 36759 - protein, 10 aa, Artificial Sequence
  Description of Artificial Sequence: Synthetic epitope
QKIAKAEISS

SEQ ID NO: 36760 - protein, 10 aa, Artificial Sequence
  Description of Artificial Sequence: Synthetic epitope
QKIAKAMRKQ

SEQ ID NO: 36761 - protein, 10 aa, Artificial Sequence
  Description of Artificial Sequence: Synthetic epitope
QKIATARKLT

SEQ ID NO: 36762 - protein, 10 aa, Artificial Sequence
  Description of Artificial Sequence: Synthetic epitope
QKIATQSQIT

SEQ ID NO: 36763 - protein, 10 aa, Artificial Sequence
  Description of Artificial Sequence: Synthetic epitope
QKIFGATKHR

SEQ ID NO: 36764 - protein, 10 aa, Artificial Sequence
  Description of Artificial Sequence: Synthetic epitope
QKIGIKKEVL

SEQ ID NO: 36765 - protein, 10 aa, Artificial Sequence
  Description of Artificial Sequence: Synthetic epitope
QKIHPTSVIS

SEQ ID NO: 36766 - protein, 10 aa, Artificial Sequence
  Description of Artificial Sequence: Synthetic epitope
QKIIPDQDQL

SEQ ID NO: 36767 - protein, 10 aa, Artificial Sequence
  Description of Artificial Sequence: Synthetic epitope
QKIIVELDEE

SEQ ID NO: 36768 - protein, 10 aa, Artificial Sequence
  Description of Artificial Sequence: Synthetic epitope
QKIKATVFDD

SEQ ID NO: 36769 - protein, 10 aa, Artificial Sequence
  Description of Artificial Sequence: Synthetic epitope
QKIKKEPEEA

SEQ ID NO: 36770 - protein, 10 aa, Artificial Sequence
  Description of Artificial Sequence: Synthetic epitope
QKIKLAQKSE

SEQ ID NO: 36771 - protein, 10 aa, Artificial Sequence
  Description of Artificial Sequence: Synthetic epitope
QKIKSHIQQL

SEQ ID NO: 36772 - protein, 10 aa, Artificial Sequence
  Description of Artificial Sequence: Synthetic epitope
QKIKSQLKEQ

SEQ ID NO: 36773 - protein, 10 aa, Artificial Sequence
  Description of Artificial Sequence: Synthetic epitope
QKILAKLNAL

SEQ ID NO: 36774 - protein, 10 aa, Artificial Sequence
  Description of Artificial Sequence: Synthetic epitope
QKILATATTS

SEQ ID NO: 36775 - protein, 10 aa, Artificial Sequence
  Description of Artificial Sequence: Synthetic epitope
QKILQVPAME

SEQ ID NO: 36776 - protein, 10 aa, Artificial Sequence
  Description of Artificial Sequence: Synthetic epitope
QKIMQAATPT

SEQ ID NO: 36777 - protein, 10 aa, Artificial Sequence
  Description of Artificial Sequence: Synthetic epitope
QKINTMVLDL

SEQ ID NO: 36778 - protein, 10 aa, Artificial Sequence
  Description of Artificial Sequence: Synthetic epitope
QKIQALDRGT

SEQ ID NO: 36779 - protein, 10 aa, Artificial Sequence
  Description of Artificial Sequence: Synthetic epitope
QKIQKFQIAQ

SEQ ID NO: 36780 - protein, 10 aa, Artificial Sequence
  Description of Artificial Sequence: Synthetic epitope
QKIQRTARKL

SEQ ID NO: 36781 - protein, 10 aa, Artificial Sequence
  Description of Artificial Sequence: Synthetic epitope
QKIQSGHSLE

SEQ ID NO: 36782 - protein, 10 aa, Artificial Sequence
  Description of Artificial Sequence: Synthetic epitope
QKISAQENMW

SEQ ID NO: 36783 - protein, 10 aa, Artificial Sequence
  Description of Artificial Sequence: Synthetic epitope
QKISEWGKIK

SEQ ID NO: 36784 - protein, 10 aa, Artificial Sequence
  Description of Artificial Sequence: Synthetic epitope
QKISIETNEK

SEQ ID NO: 36785 - protein, 10 aa, Artificial Sequence
  Description of Artificial Sequence: Synthetic epitope
QKISVKFDAV

SEQ ID NO: 36786 - protein, 10 aa, Artificial Sequence
  Description of Artificial Sequence: Synthetic epitope
QKITKEMDDF

SEQ ID NO: 36787 - protein, 10 aa, Artificial Sequence
  Description of Artificial Sequence: Synthetic epitope
QKITKSMKMV

SEQ ID NO: 36788 - protein, 10 aa, Artificial Sequence
  Description of Artificial Sequence: Synthetic epitope
QKITKTLPDA

SEQ ID NO: 36789 - protein, 10 aa, Artificial Sequence
  Description of Artificial Sequence: Synthetic epitope
QKIYGENGSK

SEQ ID NO: 36790 - protein, 10 aa, Artificial Sequence
  Description of Artificial Sequence: Synthetic epitope
QKKADEVLEI

SEQ ID NO: 36791 - protein, 10 aa, Artificial Sequence
  Description of Artificial Sequence: Synthetic epitope
QKKAEVEGKD

SEQ ID NO: 36792 - protein, 10 aa, Artificial Sequence
  Description of Artificial Sequence: Synthetic epitope
QKKAIKKERQ

SEQ ID NO: 36793 - protein, 10 aa, Artificial Sequence
  Description of Artificial Sequence: Synthetic epitope
QKKALSKTSK

SEQ ID NO: 36794 - protein, 10 aa, Artificial Sequence
  Description of Artificial Sequence: Synthetic epitope
QKKATAEGSA

SEQ ID NO: 36795 - protein, 10 aa, Artificial Sequence
  Description of Artificial Sequence: Synthetic epitope
QKKDQQLEPK

SEQ ID NO: 36796 - protein, 10 aa, Artificial Sequence
  Description of Artificial Sequence: Synthetic epitope
QKKEEPKKAQ

SEQ ID NO: 36797 - protein, 10 aa, Artificial Sequence
  Description of Artificial Sequence: Synthetic epitope
QKKETKRALD

SEQ ID NO: 36798 - protein, 10 aa, Artificial Sequence
  Description of Artificial Sequence: Synthetic epitope
QKKFTITSSV

SEQ ID NO: 36799 - protein, 10 aa, Artificial Sequence
  Description of Artificial Sequence: Synthetic epitope
QKKGKAAKTA

SEQ ID NO: 36800 - protein, 10 aa, Artificial Sequence
  Description of Artificial Sequence: Synthetic epitope
QKKIESLQLE

SEQ ID NO: 36801 - protein, 10 aa, Artificial Sequence
  Description of Artificial Sequence: Synthetic epitope
QKKIKKLESV

SEQ ID NO: 36802 - protein, 10 aa, Artificial Sequence
  Description of Artificial Sequence: Synthetic epitope
QKKINKIEYE

SEQ ID NO: 36803 - protein, 10 aa, Artificial Sequence
  Description of Artificial Sequence: Synthetic epitope
QKKIQLIESI

SEQ ID NO: 36804 - protein, 10 aa, Artificial Sequence
  Description of Artificial Sequence: Synthetic epitope
QKKISLKIQN

SEQ ID NO: 36805 - protein, 10 aa, Artificial Sequence
  Description of Artificial Sequence: Synthetic epitope
QKKLAGDESA

SEQ ID NO: 36806 - protein, 10 aa, Artificial Sequence
  Description of Artificial Sequence: Synthetic epitope
QKKLDSIIDL

SEQ ID NO: 36807 - protein, 10 aa, Artificial Sequence
  Description of Artificial Sequence: Synthetic epitope
QKKLEGIRPE

SEQ ID NO: 36808 - protein, 10 aa, Artificial Sequence
  Description of Artificial Sequence: Synthetic epitope
QKKLEVAMEE

SEQ ID NO: 36809 - protein, 10 aa, Artificial Sequence
  Description of Artificial Sequence: Synthetic epitope
QKKLEVLTKE

SEQ ID NO: 36810 - protein, 10 aa, Artificial Sequence
  Description of Artificial Sequence: Synthetic epitope
QKKLLQTRGP

SEQ ID NO: 36811 - protein, 10 aa, Artificial Sequence
  Description of Artificial Sequence: Synthetic epitope
QKKLMSLANS

SEQ ID NO: 36812 - protein, 10 aa, Artificial Sequence
  Description of Artificial Sequence: Synthetic epitope
QKKLQASQPS

SEQ ID NO: 36813 - protein, 10 aa, Artificial Sequence
  Description of Artificial Sequence: Synthetic epitope
QKKLSESRHQ

SEQ ID NO: 36814 - protein, 10 aa, Artificial Sequence
  Description of Artificial Sequence: Synthetic epitope
QKKLSVADQE

SEQ ID NO: 36815 - protein, 10 aa, Artificial Sequence
  Description of Artificial Sequence: Synthetic epitope
QKKLTEGEQD

SEQ ID NO: 36816 - protein, 10 aa, Artificial Sequence
  Description of Artificial Sequence: Synthetic epitope
QKKLVIQGKH

SEQ ID NO: 36817 - protein, 10 aa, Artificial Sequence
  Description of Artificial Sequence: Synthetic epitope
QKKMKLGKDE

SEQ ID NO: 36818 - protein, 10 aa, Artificial Sequence
  Description of Artificial Sequence: Synthetic epitope
QKKNAAGALD

SEQ ID NO: 36819 - protein, 10 aa, Artificial Sequence
  Description of Artificial Sequence: Synthetic epitope
QKKNEQKRKE

SEQ ID NO: 36820 - protein, 10 aa, Artificial Sequence
  Description of Artificial Sequence: Synthetic epitope
QKKNLQQTTN

SEQ ID NO: 36821 - protein, 10 aa, Artificial Sequence
  Description of Artificial Sequence: Synthetic epitope
QKKPEEQHNK

SEQ ID NO: 36822 - protein, 10 aa, Artificial Sequence
  Description of Artificial Sequence: Synthetic epitope
QKKQLFKHSA

SEQ ID NO: 36823 - protein, 10 aa, Artificial Sequence
  Description of Artificial Sequence: Synthetic epitope
QKKQQDSKKL

SEQ ID NO: 36824 - protein, 10 aa, Artificial Sequence
  Description of Artificial Sequence: Synthetic epitope
QKKQVQIQKE

SEQ ID NO: 36825 - protein, 10 aa, Artificial Sequence
  Description of Artificial Sequence: Synthetic epitope
QKKRKAQAAE

SEQ ID NO: 36826 - protein, 10 aa, Artificial Sequence
  Description of Artificial Sequence: Synthetic epitope
QKKRVAFNVS

SEQ ID NO: 36827 - protein, 10 aa, Artificial Sequence
  Description of Artificial Sequence: Synthetic epitope
QKKSAKERKP

SEQ ID NO: 36828 - protein, 10 aa, Artificial Sequence
  Description of Artificial Sequence: Synthetic epitope
QKKSEIDSKI

SEQ ID NO: 36829 - protein, 10 aa, Artificial Sequence
  Description of Artificial Sequence: Synthetic epitope
QKKSKKEATD

SEQ ID NO: 36830 - protein, 10 aa, Artificial Sequence
  Description of Artificial Sequence: Synthetic epitope
QKKSQDLESV

SEQ ID NO: 36831 - protein, 10 aa, Artificial Sequence
  Description of Artificial Sequence: Synthetic epitope
QKKTDFKPED

SEQ ID NO: 36832 - protein, 10 aa, Artificial Sequence
  Description of Artificial Sequence: Synthetic epitope
QKKTVRVGLN

SEQ ID NO: 36833 - protein, 10 aa, Artificial Sequence
  Description of Artificial Sequence: Synthetic epitope
QKKVAKLQKA

SEQ ID NO: 36834 - protein, 10 aa, Artificial Sequence
  Description of Artificial Sequence: Synthetic epitope
QKKVTGQNSK

SEQ ID NO: 36835 - protein, 10 aa, Artificial Sequence
  Description of Artificial Sequence: Synthetic epitope
QKKWQKSAET

SEQ ID NO: 36836 - protein, 10 aa, Artificial Sequence
  Description of Artificial Sequence: Synthetic epitope
QKLAEARLAA

SEQ ID NO: 36837 - protein, 10 aa, Artificial Sequence
  Description of Artificial Sequence: Synthetic epitope
QKLAKSRKKA

SEQ ID NO: 36838 - protein, 10 aa, Artificial Sequence
  Description of Artificial Sequence: Synthetic epitope
QKLAQTASKE

SEQ ID NO: 36839 - protein, 10 aa, Artificial Sequence
  Description of Artificial Sequence: Synthetic epitope
QKLAQVATEE

SEQ ID NO: 36840 - protein, 10 aa, Artificial Sequence
  Description of Artificial Sequence: Synthetic epitope
QKLASALAHN

SEQ ID NO: 36841 - protein, 10 aa, Artificial Sequence
  Description of Artificial Sequence: Synthetic epitope
QKLASLNSGS

SEQ ID NO: 36842 - protein, 10 aa, Artificial Sequence
  Description of Artificial Sequence: Synthetic epitope
QKLAYMELQQ

SEQ ID NO: 36843 - protein, 10 aa, Artificial Sequence
  Description of Artificial Sequence: Synthetic epitope
QKLDDIKDRI

SEQ ID NO: 36844 - protein, 10 aa, Artificial Sequence
  Description of Artificial Sequence: Synthetic epitope
QKLEAETNVD

SEQ ID NO: 36845 - protein, 10 aa, Artificial Sequence
  Description of Artificial Sequence: Synthetic epitope
QKLEISAETE

SEQ ID NO: 36846 - protein, 10 aa, Artificial Sequence
  Description of Artificial Sequence: Synthetic epitope
QKLELNIVPR

SEQ ID NO: 36847 - protein, 10 aa, Artificial Sequence
  Description of Artificial Sequence: Synthetic epitope
QKLESTTRKA

SEQ ID NO: 36848 - protein, 10 aa, Artificial Sequence
  Description of Artificial Sequence: Synthetic epitope
QKLGKKAVNK

SEQ ID NO: 36849 - protein, 10 aa, Artificial Sequence
  Description of Artificial Sequence: Synthetic epitope
QKLGTEVFEE

SEQ ID NO: 36850 - protein, 10 aa, Artificial Sequence
  Description of Artificial Sequence: Synthetic epitope
QKLHLKAESS

SEQ ID NO: 36851 - protein, 10 aa, Artificial Sequence
  Description of Artificial Sequence: Synthetic epitope
QKLHVSRQNS

SEQ ID NO: 36852 - protein, 10 aa, Artificial Sequence
  Description of Artificial Sequence: Synthetic epitope
QKLIETVVKQ

SEQ ID NO: 36853 - protein, 10 aa, Artificial Sequence
  Description of Artificial Sequence: Synthetic epitope
QKLISSNAAF

SEQ ID NO: 36854 - protein, 10 aa, Artificial Sequence
  Description of Artificial Sequence: Synthetic epitope
QKLITSAHWK

SEQ ID NO: 36855 - protein, 10 aa, Artificial Sequence
  Description of Artificial Sequence: Synthetic epitope
QKLIVWKFPP

SEQ ID NO: 36856 - protein, 10 aa, Artificial Sequence
  Description of Artificial Sequence: Synthetic epitope
QKLKEVISLE

SEQ ID NO: 36857 - protein, 10 aa, Artificial Sequence
  Description of Artificial Sequence: Synthetic epitope
QKLKKMVDKP

SEQ ID NO: 36858 - protein, 10 aa, Artificial Sequence
  Description of Artificial Sequence: Synthetic epitope
QKLKNSLEEA

SEQ ID NO: 36859 - protein, 10 aa, Artificial Sequence
  Description of Artificial Sequence: Synthetic epitope
QKLLEKSHDR

SEQ ID NO: 36860 - protein, 10 aa, Artificial Sequence
  Description of Artificial Sequence: Synthetic epitope
QKLLERVPIP

SEQ ID NO: 36861 - protein, 10 aa, Artificial Sequence
  Description of Artificial Sequence: Synthetic epitope
QKLLFLQSRL

SEQ ID NO: 36862 - protein, 10 aa, Artificial Sequence
  Description of Artificial Sequence: Synthetic epitope
QKLLGKLQTA

SEQ ID NO: 36863 - protein, 10 aa, Artificial Sequence
  Description of Artificial Sequence: Synthetic epitope
QKLLSRIARD

SEQ ID NO: 36864 - protein, 10 aa, Artificial Sequence
  Description of Artificial Sequence: Synthetic epitope
QKLLSSEMDL

SEQ ID NO: 36865 - protein, 10 aa, Artificial Sequence
  Description of Artificial Sequence: Synthetic epitope
QKLLSTVPAA

SEQ ID NO: 36866 - protein, 10 aa, Artificial Sequence
  Description of Artificial Sequence: Synthetic epitope
QKLMDVGLIA

SEQ ID NO: 36867 - protein, 10 aa, Artificial Sequence
  Description of Artificial Sequence: Synthetic epitope
QKLMMNDNDI

SEQ ID NO: 36868 - protein, 10 aa, Artificial Sequence
  Description of Artificial Sequence: Synthetic epitope
QKLNYMLLAK

SEQ ID NO: 36869 - protein, 10 aa, Artificial Sequence
  Description of Artificial Sequence: Synthetic epitope
QKLPMIGRTS

SEQ ID NO: 36870 - protein, 10 aa, Artificial Sequence
  Description of Artificial Sequence: Synthetic epitope
QKLPTPVNQA

SEQ ID NO: 36871 - protein, 10 aa, Artificial Sequence
  Description of Artificial Sequence: Synthetic epitope
QKLQAEAQER

SEQ ID NO: 36872 - protein, 10 aa, Artificial Sequence
  Description of Artificial Sequence: Synthetic epitope
QKLQAESEKQ

SEQ ID NO: 36873 - protein, 10 aa, Artificial Sequence
  Description of Artificial Sequence: Synthetic epitope
QKLQIKNKEE

SEQ ID NO: 36874 - protein, 10 aa, Artificial Sequence
  Description of Artificial Sequence: Synthetic epitope
QKLQKKDLQA

SEQ ID NO: 36875 - protein, 10 aa, Artificial Sequence
  Description of Artificial Sequence: Synthetic epitope
QKLQRAALKN

SEQ ID NO: 36876 - protein, 10 aa, Artificial Sequence
  Description of Artificial Sequence: Synthetic epitope
QKLQTNAHNR

SEQ ID NO: 36877 - protein, 10 aa, Artificial Sequence
  Description of Artificial Sequence: Synthetic epitope
QKLRQEVKQN

SEQ ID NO: 36878 - protein, 10 aa, Artificial Sequence
  Description of Artificial Sequence: Synthetic epitope
QKLRSKIHKK

SEQ ID NO: 36879 - protein, 10 aa, Artificial Sequence
  Description of Artificial Sequence: Synthetic epitope
QKLRTNIVAL

SEQ ID NO: 36880 - protein, 10 aa, Artificial Sequence
  Description of Artificial Sequence: Synthetic epitope
QKLSEHNNAN

SEQ ID NO: 36881 - protein, 10 aa, Artificial Sequence
  Description of Artificial Sequence: Synthetic epitope
QKLSESRETK

SEQ ID NO: 36882 - protein, 10 aa, Artificial Sequence
  Description of Artificial Sequence: Synthetic epitope
QKLSIEDSNY

SEQ ID NO: 36883 - protein, 10 aa, Artificial Sequence
  Description of Artificial Sequence: Synthetic epitope
QKLSKIKSNK

SEQ ID NO: 36884 - protein, 10 aa, Artificial Sequence
  Description of Artificial Sequence: Synthetic epitope
QKLSSKSIMD

SEQ ID NO: 36885 - protein, 10 aa, Artificial Sequence
  Description of Artificial Sequence: Synthetic epitope
QKLSSLVLPA

SEQ ID NO: 36886 - protein, 10 aa, Artificial Sequence
  Description of Artificial Sequence: Synthetic epitope
QKLSTKLSAQ

SEQ ID NO: 36887 - protein, 10 aa, Artificial Sequence
  Description of Artificial Sequence: Synthetic epitope
QKLTAGITRK

SEQ ID NO: 36888 - protein, 10 aa, Artificial Sequence
  Description of Artificial Sequence: Synthetic epitope
QKLTEAQRDM

SEQ ID NO: 36889 - protein, 10 aa, Artificial Sequence
  Description of Artificial Sequence: Synthetic epitope
QKLYSRAQRH

SEQ ID NO: 36890 - protein, 10 aa, Artificial Sequence
  Description of Artificial Sequence: Synthetic epitope
QKMAEDILSL

SEQ ID NO: 36891 - protein, 10 aa, Artificial Sequence
  Description of Artificial Sequence: Synthetic epitope
QKMAQKIMKM

SEQ ID NO: 36892 - protein, 10 aa, Artificial Sequence
  Description of Artificial Sequence: Synthetic epitope
QKMDSMLSSE

SEQ ID NO: 36893 - protein, 10 aa, Artificial Sequence
  Description of Artificial Sequence: Synthetic epitope
QKMDVKSALS

SEQ ID NO: 36894 - protein, 10 aa, Artificial Sequence
  Description of Artificial Sequence: Synthetic epitope
QKMEASARLE

SEQ ID NO: 36895 - protein, 10 aa, Artificial Sequence
  Description of Artificial Sequence: Synthetic epitope
QKMEIISETE

SEQ ID NO: 36896 - protein, 10 aa, Artificial Sequence
  Description of Artificial Sequence: Synthetic epitope
QKMMKFGRKK

SEQ ID NO: 36897 - protein, 10 aa, Artificial Sequence
  Description of Artificial Sequence: Synthetic epitope
QKMMVTLEPH

SEQ ID NO: 36898 - protein, 10 aa, Artificial Sequence
  Description of Artificial Sequence: Synthetic epitope
QKMPLSKELG

SEQ ID NO: 36899 - protein, 10 aa, Artificial Sequence
  Description of Artificial Sequence: Synthetic epitope
QKMRIEVGLD

SEQ ID NO: 36900 - protein, 10 aa, Artificial Sequence
  Description of Artificial Sequence: Synthetic epitope
QKMSEKDTKE

SEQ ID NO: 36901 - protein, 10 aa, Artificial Sequence
  Description of Artificial Sequence: Synthetic epitope
QKMSEKDTKE

SEQ ID NO: 36902 - protein, 10 aa, Artificial Sequence
  Description of Artificial Sequence: Synthetic epitope
QKMSEPIAEP

SEQ ID NO: 36903 - protein, 10 aa, Artificial Sequence
  Description of Artificial Sequence: Synthetic epitope
QKMTETAQKF

SEQ ID NO: 36904 - protein, 10 aa, Artificial Sequence
  Description of Artificial Sequence: Synthetic epitope
QKMVAIPTKY

SEQ ID NO: 36905 - protein, 10 aa, Artificial Sequence
  Description of Artificial Sequence: Synthetic epitope
QKMVKALQDE

SEQ ID NO: 36906 - protein, 10 aa, Artificial Sequence
  Description of Artificial Sequence: Synthetic epitope
QKNATSTKAE

SEQ ID NO: 36907 - protein, 10 aa, Artificial Sequence
  Description of Artificial Sequence: Synthetic epitope
QKNAVLNKLK

SEQ ID NO: 36908 - protein, 10 aa, Artificial Sequence
  Description of Artificial Sequence: Synthetic epitope
QKNAVPAGKA

SEQ ID NO: 36909 - protein, 10 aa, Artificial Sequence
  Description of Artificial Sequence: Synthetic epitope
QKNDKKMFKS

SEQ ID NO: 36910 - protein, 10 aa, Artificial Sequence
  Description of Artificial Sequence: Synthetic epitope
QKNEKSEDIA

SEQ ID NO: 36911 - protein, 10 aa, Artificial Sequence
  Description of Artificial Sequence: Synthetic epitope
QKNGDTSTEE

SEQ ID NO: 36912 - protein, 10 aa, Artificial Sequence
  Description of Artificial Sequence: Synthetic epitope
QKNGSSAKPS

SEQ ID NO: 36913 - protein, 10 aa, Artificial Sequence
  Description of Artificial Sequence: Synthetic epitope
QKNHIAIIQD

SEQ ID NO: 36914 - protein, 10 aa, Artificial Sequence
  Description of Artificial Sequence: Synthetic epitope
QKNKSQKEKH

SEQ ID NO: 36915 - protein, 10 aa, Artificial Sequence
  Description of Artificial Sequence: Synthetic epitope
QKNLRFSQRL

SEQ ID NO: 36916 - protein, 10 aa, Artificial Sequence
  Description of Artificial Sequence: Synthetic epitope
QKNLTDAKYS

SEQ ID NO: 36917 - protein, 10 aa, Artificial Sequence
  Description of Artificial Sequence: Synthetic epitope
QKNMPSATIS

SEQ ID NO: 36918 - protein, 10 aa, Artificial Sequence
  Description of Artificial Sequence: Synthetic epitope
QKNNTLTLPE

SEQ ID NO: 36919 - protein, 10 aa, Artificial Sequence
  Description of Artificial Sequence: Synthetic epitope
QKNQSNQLTK

SEQ ID NO: 36920 - protein, 10 aa, Artificial Sequence
  Description of Artificial Sequence: Synthetic epitope
QKNQTTSVAK

SEQ ID NO: 36921 - protein, 10 aa, Artificial Sequence
  Description of Artificial Sequence: Synthetic epitope
QKNQTVFERN

SEQ ID NO: 36922 - protein, 10 aa, Artificial Sequence
  Description of Artificial Sequence: Synthetic epitope
QKNSSDQEGN

SEQ ID NO: 36923 - protein, 10 aa, Artificial Sequence
  Description of Artificial Sequence: Synthetic epitope
QKNTASSGNY

SEQ ID NO: 36924 - protein, 10 aa, Artificial Sequence
  Description of Artificial Sequence: Synthetic epitope
QKNVVTPTTG

SEQ ID NO: 36925 - protein, 10 aa, Artificial Sequence
  Description of Artificial Sequence: Synthetic epitope
QKPDMKPRVS

SEQ ID NO: 36926 - protein, 10 aa, Artificial Sequence
  Description of Artificial Sequence: Synthetic epitope
QKPEASVEQA

SEQ ID NO: 36927 - protein, 10 aa, Artificial Sequence
  Description of Artificial Sequence: Synthetic epitope
QKPEVDQQIV

SEQ ID NO: 36928 - protein, 10 aa, Artificial Sequence
  Description of Artificial Sequence: Synthetic epitope
QKPITALKAA

SEQ ID NO: 36929 - protein, 10 aa, Artificial Sequence
  Description of Artificial Sequence: Synthetic epitope
QKPKDKQIKD

SEQ ID NO: 36930 - protein, 10 aa, Artificial Sequence
  Description of Artificial Sequence: Synthetic epitope
QKPKSSLKSS

SEQ ID NO: 36931 - protein, 10 aa, Artificial Sequence
  Description of Artificial Sequence: Synthetic epitope
QKPMTKTSVK

SEQ ID NO: 36932 - protein, 10 aa, Artificial Sequence
  Description of Artificial Sequence: Synthetic epitope
QKPRESIIKL

SEQ ID NO: 36933 - protein, 10 aa, Artificial Sequence
  Description of Artificial Sequence: Synthetic epitope
QKPSANVKLG

SEQ ID NO: 36934 - protein, 10 aa, Artificial Sequence
  Description of Artificial Sequence: Synthetic epitope
QKPSEKAEAG

SEQ ID NO: 36935 - protein, 10 aa, Artificial Sequence
  Description of Artificial Sequence: Synthetic epitope
QKPSLLSKAQ

SEQ ID NO: 36936 - protein, 10 aa, Artificial Sequence
  Description of Artificial Sequence: Synthetic epitope
QKPSVRRIST

SEQ ID NO: 36937 - protein, 10 aa, Artificial Sequence
  Description of Artificial Sequence: Synthetic epitope
QKPVSKVVAK

SEQ ID NO: 36938 - protein, 10 aa, Artificial Sequence
  Description of Artificial Sequence: Synthetic epitope
QKQAAVSHEQ

SEQ ID NO: 36939 - protein, 10 aa, Artificial Sequence
  Description of Artificial Sequence: Synthetic epitope
QKQAAVSHEQ

SEQ ID NO: 36940 - protein, 10 aa, Artificial Sequence
  Description of Artificial Sequence: Synthetic epitope
QKQAELMEFE

SEQ ID NO: 36941 - protein, 10 aa, Artificial Sequence
  Description of Artificial Sequence: Synthetic epitope
QKQALRKSQR

SEQ ID NO: 36942 - protein, 10 aa, Artificial Sequence
  Description of Artificial Sequence: Synthetic epitope
QKQANEKRAL

SEQ ID NO: 36943 - protein, 10 aa, Artificial Sequence
  Description of Artificial Sequence: Synthetic epitope
QKQANSKKIT

SEQ ID NO: 36944 - protein, 10 aa, Artificial Sequence
  Description of Artificial Sequence: Synthetic epitope
QKQASEDSND

SEQ ID NO: 36945 - protein, 10 aa, Artificial Sequence
  Description of Artificial Sequence: Synthetic epitope
QKQDTITEES

SEQ ID NO: 36946 - protein, 10 aa, Artificial Sequence
  Description of Artificial Sequence: Synthetic epitope
QKQENTEVEE

SEQ ID NO: 36947 - protein, 10 aa, Artificial Sequence
  Description of Artificial Sequence: Synthetic epitope
QKQEVAEETE

SEQ ID NO: 36948 - protein, 10 aa, Artificial Sequence
  Description of Artificial Sequence: Synthetic epitope
QKQHSFTSSD

SEQ ID NO: 36949 - protein, 10 aa, Artificial Sequence
  Description of Artificial Sequence: Synthetic epitope
QKQIMEIEEQ

SEQ ID NO: 36950 - protein, 10 aa, Artificial Sequence
  Description of Artificial Sequence: Synthetic epitope
QKQIMSELEI

SEQ ID NO: 36951 - protein, 10 aa, Artificial Sequence
  Description of Artificial Sequence: Synthetic epitope
QKQITAKRGQ

SEQ ID NO: 36952 - protein, 10 aa, Artificial Sequence
  Description of Artificial Sequence: Synthetic epitope
QKQKEEGLQA

SEQ ID NO: 36953 - protein, 10 aa, Artificial Sequence
  Description of Artificial Sequence: Synthetic epitope
QKQKESQRLE

SEQ ID NO: 36954 - protein, 10 aa, Artificial Sequence
  Description of Artificial Sequence: Synthetic epitope
QKQKETIKAF

SEQ ID NO: 36955 - protein, 10 aa, Artificial Sequence
  Description of Artificial Sequence: Synthetic epitope
QKQKKELEAS

SEQ ID NO: 36956 - protein, 10 aa, Artificial Sequence
  Description of Artificial Sequence: Synthetic epitope
QKQKSELIQE

SEQ ID NO: 36957 - protein, 10 aa, Artificial Sequence
  Description of Artificial Sequence: Synthetic epitope
QKQLDATTDE

SEQ ID NO: 36958 - protein, 10 aa, Artificial Sequence
  Description of Artificial Sequence: Synthetic epitope
QKQLLAAQVQ

SEQ ID NO: 36959 - protein, 10 aa, Artificial Sequence
  Description of Artificial Sequence: Synthetic epitope
QKQLMTLENK

SEQ ID NO: 36960 - protein, 10 aa, Artificial Sequence
  Description of Artificial Sequence: Synthetic epitope
QKQLTQPETH

SEQ ID NO: 36961 - protein, 10 aa, Artificial Sequence
  Description of Artificial Sequence: Synthetic epitope
QKQMEVVTKG

SEQ ID NO: 36962 - protein, 10 aa, Artificial Sequence
  Description of Artificial Sequence: Synthetic epitope
QKQNDLTRPR

SEQ ID NO: 36963 - protein, 10 aa, Artificial Sequence
  Description of Artificial Sequence: Synthetic epitope
QKQNHLQADN

SEQ ID NO: 36964 - protein, 10 aa, Artificial Sequence
  Description of Artificial Sequence: Synthetic epitope
QKQNSKSVPS

SEQ ID NO: 36965 - protein, 10 aa, Artificial Sequence
  Description of Artificial Sequence: Synthetic epitope
QKQPEKNAGP

SEQ ID NO: 36966 - protein, 10 aa, Artificial Sequence
  Description of Artificial Sequence: Synthetic epitope
QKQQGLMKLP

SEQ ID NO: 36967 - protein, 10 aa, Artificial Sequence
  Description of Artificial Sequence: Synthetic epitope
QKQQKSIQGE

SEQ ID NO: 36968 - protein, 10 aa, Artificial Sequence
  Description of Artificial Sequence: Synthetic epitope
QKQQLKNGRE

SEQ ID NO: 36969 - protein, 10 aa, Artificial Sequence
  Description of Artificial Sequence: Synthetic epitope
QKQQTQVKNP

SEQ ID NO: 36970 - protein, 10 aa, Artificial Sequence
  Description of Artificial Sequence: Synthetic epitope
QKQRKSNKMK

SEQ ID NO: 36971 - protein, 10 aa, Artificial Sequence
  Description of Artificial Sequence: Synthetic epitope
QKQRTSMDAS

SEQ ID NO: 36972 - protein, 10 aa, Artificial Sequence
  Description of Artificial Sequence: Synthetic epitope
QKQSAFLQEH

SEQ ID NO: 36973 - protein, 10 aa, Artificial Sequence
  Description of Artificial Sequence: Synthetic epitope
QKQSKVSSEL

SEQ ID NO: 36974 - protein, 10 aa, Artificial Sequence
  Description of Artificial Sequence: Synthetic epitope
QKQTKVTSVG

SEQ ID NO: 36975 - protein, 10 aa, Artificial Sequence
  Description of Artificial Sequence: Synthetic epitope
QKQTSEGLAE

SEQ ID NO: 36976 - protein, 10 aa, Artificial Sequence
  Description of Artificial Sequence: Synthetic epitope
QKQVAGNSIR

SEQ ID NO: 36977 - protein, 10 aa, Artificial Sequence
  Description of Artificial Sequence: Synthetic epitope
QKQVEKSQNK

SEQ ID NO: 36978 - protein, 10 aa, Artificial Sequence
  Description of Artificial Sequence: Synthetic epitope
QKQVKSLPKK

SEQ ID NO: 36979 - protein, 10 aa, Artificial Sequence
  Description of Artificial Sequence: Synthetic epitope
QKQVSPSSEG

SEQ ID NO: 36980 - protein, 10 aa, Artificial Sequence
  Description of Artificial Sequence: Synthetic epitope
QKQVSSTEKT

SEQ ID NO: 36981 - protein, 10 aa, Artificial Sequence
  Description of Artificial Sequence: Synthetic epitope
QKQVVQATAE

SEQ ID NO: 36982 - protein, 10 aa, Artificial Sequence
  Description of Artificial Sequence: Synthetic epitope
QKQWLSKKST

SEQ ID NO: 36983 - protein, 10 aa, Artificial Sequence
  Description of Artificial Sequence: Synthetic epitope
QKRALNTRRM

SEQ ID NO: 36984 - protein, 10 aa, Artificial Sequence
  Description of Artificial Sequence: Synthetic epitope
QKRDVSLGTY

SEQ ID NO: 36985 - protein, 10 aa, Artificial Sequence
  Description of Artificial Sequence: Synthetic epitope
QKRELVNPAS

SEQ ID NO: 36986 - protein, 10 aa, Artificial Sequence
  Description of Artificial Sequence: Synthetic epitope
QKRFARLASK

SEQ ID NO: 36987 - protein, 10 aa, Artificial Sequence
  Description of Artificial Sequence: Synthetic epitope
QKRIGTADRE

SEQ ID NO: 36988 - protein, 10 aa, Artificial Sequence
  Description of Artificial Sequence: Synthetic epitope
QKRISTKKNP

SEQ ID NO: 36989 - protein, 10 aa, Artificial Sequence
  Description of Artificial Sequence: Synthetic epitope
QKRKASQLVG

SEQ ID NO: 36990 - protein, 10 aa, Artificial Sequence
  Description of Artificial Sequence: Synthetic epitope
QKRKIQVERE

SEQ ID NO: 36991 - protein, 10 aa, Artificial Sequence
  Description of Artificial Sequence: Synthetic epitope
QKRKKEARAA

SEQ ID NO: 36992 - protein, 10 aa, Artificial Sequence
  Description of Artificial Sequence: Synthetic epitope
QKRKSNVESA

SEQ ID NO: 36993 - protein, 10 aa, Artificial Sequence
  Description of Artificial Sequence: Synthetic epitope
QKRLKMAEED

SEQ ID NO: 36994 - protein, 10 aa, Artificial Sequence
  Description of Artificial Sequence: Synthetic epitope
QKRLNRAQEK

SEQ ID NO: 36995 - protein, 10 aa, Artificial Sequence
  Description of Artificial Sequence: Synthetic epitope
QKRMNEAVQA

SEQ ID NO: 36996 - protein, 10 aa, Artificial Sequence
  Description of Artificial Sequence: Synthetic epitope
QKRPEKRQQS

SEQ ID NO: 36997 - protein, 10 aa, Artificial Sequence
  Description of Artificial Sequence: Synthetic epitope
QKRQKQVKDN

SEQ ID NO: 36998 - protein, 10 aa, Artificial Sequence
  Description of Artificial Sequence: Synthetic epitope
QKRQKQVPAH

SEQ ID NO: 36999 - protein, 10 aa, Artificial Sequence
  Description of Artificial Sequence: Synthetic epitope
QKRQQMKIPD

SEQ ID NO: 37000 - protein, 10 aa, Artificial Sequence
  Description of Artificial Sequence: Synthetic epitope
QKRSKAIHSS

SEQ ID NO: 37001 - protein, 10 aa, Artificial Sequence
  Description of Artificial Sequence: Synthetic epitope
QKRTLASVKI

SEQ ID NO: 37002 - protein, 10 aa, Artificial Sequence
  Description of Artificial Sequence: Synthetic epitope
QKRTSVTPHQ

SEQ ID NO: 37003 - protein, 10 aa, Artificial Sequence
  Description of Artificial Sequence: Synthetic epitope
QKRTVEDRML

SEQ ID NO: 37004 - protein, 10 aa, Artificial Sequence
  Description of Artificial Sequence: Synthetic epitope
QKRVTMLTAP

SEQ ID NO: 37005 - protein, 10 aa, Artificial Sequence
  Description of Artificial Sequence: Synthetic epitope
QKSAEDAERQ

SEQ ID NO: 37006 - protein, 10 aa, Artificial Sequence
  Description of Artificial Sequence: Synthetic epitope
QKSAKSSRLP

SEQ ID NO: 37007 - protein, 10 aa, Artificial Sequence
  Description of Artificial Sequence: Synthetic epitope
QKSASTEATH

SEQ ID NO: 37008 - protein, 10 aa, Artificial Sequence
  Description of Artificial Sequence: Synthetic epitope
QKSATHLQRS

SEQ ID NO: 37009 - protein, 10 aa, Artificial Sequence
  Description of Artificial Sequence: Synthetic epitope
QKSDSEEKSD

SEQ ID NO: 37010 - protein, 10 aa, Artificial Sequence
  Description of Artificial Sequence: Synthetic epitope
QKSEARKRVN

SEQ ID NO: 37011 - protein, 10 aa, Artificial Sequence
  Description of Artificial Sequence: Synthetic epitope
QKSEFKFSEE

SEQ ID NO: 37012 - protein, 10 aa, Artificial Sequence
  Description of Artificial Sequence: Synthetic epitope
QKSEFVEKST

SEQ ID NO: 37013 - protein, 10 aa, Artificial Sequence
  Description of Artificial Sequence: Synthetic epitope
QKSELAGFYP

SEQ ID NO: 37014 - protein, 10 aa, Artificial Sequence
  Description of Artificial Sequence: Synthetic epitope
QKSENEDDSE

SEQ ID NO: 37015 - protein, 10 aa, Artificial Sequence
  Description of Artificial Sequence: Synthetic epitope
QKSESTNSDT

SEQ ID NO: 37016 - protein, 10 aa, Artificial Sequence
  Description of Artificial Sequence: Synthetic epitope
QKSEVKTDTD

SEQ ID NO: 37017 - protein, 10 aa, Artificial Sequence
  Description of Artificial Sequence: Synthetic epitope
QKSGASVVAI

SEQ ID NO: 37018 - protein, 10 aa, Artificial Sequence
  Description of Artificial Sequence: Synthetic epitope
QKSGELNGDQ

SEQ ID NO: 37019 - protein, 10 aa, Artificial Sequence
  Description of Artificial Sequence: Synthetic epitope
QKSIADEKAG

SEQ ID NO: 37020 - protein, 10 aa, Artificial Sequence
  Description of Artificial Sequence: Synthetic epitope
QKSIADEKAR

SEQ ID NO: 37021 - protein, 10 aa, Artificial Sequence
  Description of Artificial Sequence: Synthetic epitope
QKSIADEKAR

SEQ ID NO: 37022 - protein, 10 aa, Artificial Sequence
  Description of Artificial Sequence: Synthetic epitope
QKSIADEKAR

SEQ ID NO: 37023 - protein, 10 aa, Artificial Sequence
  Description of Artificial Sequence: Synthetic epitope
QKSIADEKAR

SEQ ID NO: 37024 - protein, 10 aa, Artificial Sequence
  Description of Artificial Sequence: Synthetic epitope
QKSIADEKAR

SEQ ID NO: 37025 - protein, 10 aa, Artificial Sequence
  Description of Artificial Sequence: Synthetic epitope
QKSIADEKAR

SEQ ID NO: 37026 - protein, 10 aa, Artificial Sequence
  Description of Artificial Sequence: Synthetic epitope
QKSIADEKAR

SEQ ID NO: 37027 - protein, 10 aa, Artificial Sequence
  Description of Artificial Sequence: Synthetic epitope
QKSIADEKAR

SEQ ID NO: 37028 - protein, 10 aa, Artificial Sequence
  Description of Artificial Sequence: Synthetic epitope
QKSIAIEKAR

SEQ ID NO: 37029 - protein, 10 aa, Artificial Sequence
  Description of Artificial Sequence: Synthetic epitope
QKSIEKAKIG

SEQ ID NO: 37030 - protein, 10 aa, Artificial Sequence
  Description of Artificial Sequence: Synthetic epitope
QKSIIKLSSE

SEQ ID NO: 37031 - protein, 10 aa, Artificial Sequence
  Description of Artificial Sequence: Synthetic epitope
QKSISQHYSK

SEQ ID NO: 37032 - protein, 10 aa, Artificial Sequence
  Description of Artificial Sequence: Synthetic epitope
QKSKDLQAQA

SEQ ID NO: 37033 - protein, 10 aa, Artificial Sequence
  Description of Artificial Sequence: Synthetic epitope
QKSKEKLTTR

SEQ ID NO: 37034 - protein, 10 aa, Artificial Sequence
  Description of Artificial Sequence: Synthetic epitope
QKSKENTDFE

SEQ ID NO: 37035 - protein, 10 aa, Artificial Sequence
  Description of Artificial Sequence: Synthetic epitope
QKSKENYNAK

SEQ ID NO: 37036 - protein, 10 aa, Artificial Sequence
  Description of Artificial Sequence: Synthetic epitope
QKSKNIEKAQ

SEQ ID NO: 37037 - protein, 10 aa, Artificial Sequence
  Description of Artificial Sequence: Synthetic epitope
QKSKQQAKIE

SEQ ID NO: 37038 - protein, 10 aa, Artificial Sequence
  Description of Artificial Sequence: Synthetic epitope
QKSKSEVIED

SEQ ID NO: 37039 - protein, 10 aa, Artificial Sequence
  Description of Artificial Sequence: Synthetic epitope
QKSLAELGGH

SEQ ID NO: 37040 - protein, 10 aa, Artificial Sequence
  Description of Artificial Sequence: Synthetic epitope
QKSLAQAEAE

SEQ ID NO: 37041 - protein, 10 aa, Artificial Sequence
  Description of Artificial Sequence: Synthetic epitope
QKSLNEASMD

SEQ ID NO: 37042 - protein, 10 aa, Artificial Sequence
  Description of Artificial Sequence: Synthetic epitope
QKSLNQHSGS

SEQ ID NO: 37043 - protein, 10 aa, Artificial Sequence
  Description of Artificial Sequence: Synthetic epitope
QKSLSSVSDT

SEQ ID NO: 37044 - protein, 10 aa, Artificial Sequence
  Description of Artificial Sequence: Synthetic epitope
QKSLSVKEVK

SEQ ID NO: 37045 - protein, 10 aa, Artificial Sequence
  Description of Artificial Sequence: Synthetic epitope
QKSLVMSGPY

SEQ ID NO: 37046 - protein, 10 aa, Artificial Sequence
  Description of Artificial Sequence: Synthetic epitope
QKSMLVHSKI

SEQ ID NO: 37047 - protein, 10 aa, Artificial Sequence
  Description of Artificial Sequence: Synthetic epitope
QKSNSISQRH

SEQ ID NO: 37048 - protein, 10 aa, Artificial Sequence
  Description of Artificial Sequence: Synthetic epitope
QKSPQKIAKK

SEQ ID NO: 37049 - protein, 10 aa, Artificial Sequence
  Description of Artificial Sequence: Synthetic epitope
QKSPVRAEFN

SEQ ID NO: 37050 - protein, 10 aa, Artificial Sequence
  Description of Artificial Sequence: Synthetic epitope
QKSQSSDLLE

SEQ ID NO: 37051 - protein, 10 aa, Artificial Sequence
  Description of Artificial Sequence: Synthetic epitope
QKSQYYSTVG

SEQ ID NO: 37052 - protein, 10 aa, Artificial Sequence
  Description of Artificial Sequence: Synthetic epitope
QKSRAELVGQ

SEQ ID NO: 37053 - protein, 10 aa, Artificial Sequence
  Description of Artificial Sequence: Synthetic epitope
QKSRQRQTQK

SEQ ID NO: 37054 - protein, 10 aa, Artificial Sequence
  Description of Artificial Sequence: Synthetic epitope
QKSSELEQYL

SEQ ID NO: 37055 - protein, 10 aa, Artificial Sequence
  Description of Artificial Sequence: Synthetic epitope
QKSSETNEKP

SEQ ID NO: 37056 - protein, 10 aa, Artificial Sequence
  Description of Artificial Sequence: Synthetic epitope
QKSSGVKSTH

SEQ ID NO: 37057 - protein, 10 aa, Artificial Sequence
  Description of Artificial Sequence: Synthetic epitope
QKSSHIAEVK

SEQ ID NO: 37058 - protein, 10 aa, Artificial Sequence
  Description of Artificial Sequence: Synthetic epitope
QKSSLEATRE

SEQ ID NO: 37059 - protein, 10 aa, Artificial Sequence
  Description of Artificial Sequence: Synthetic epitope
QKSSLKGAEG

SEQ ID NO: 37060 - protein, 10 aa, Artificial Sequence
  Description of Artificial Sequence: Synthetic epitope
QKSSMSVTSL

SEQ ID NO: 37061 - protein, 10 aa, Artificial Sequence
  Description of Artificial Sequence: Synthetic epitope
QKSSQAAMPH

SEQ ID NO: 37062 - protein, 10 aa, Artificial Sequence
  Description of Artificial Sequence: Synthetic epitope
QKSSTVTSDD

SEQ ID NO: 37063 - protein, 10 aa, Artificial Sequence
  Description of Artificial Sequence: Synthetic epitope
QKSTGSKNDS

SEQ ID NO: 37064 - protein, 10 aa, Artificial Sequence
  Description of Artificial Sequence: Synthetic epitope
QKSTLADYSA

SEQ ID NO: 37065 - protein, 10 aa, Artificial Sequence
  Description of Artificial Sequence: Synthetic epitope
QKSTSISTAK

SEQ ID NO: 37066 - protein, 10 aa, Artificial Sequence
  Description of Artificial Sequence: Synthetic epitope
QKSVASIGNT

SEQ ID NO: 37067 - protein, 10 aa, Artificial Sequence
  Description of Artificial Sequence: Synthetic epitope
QKSVLATEHA

SEQ ID NO: 37068 - protein, 10 aa, Artificial Sequence
  Description of Artificial Sequence: Synthetic epitope
QKSYGIYKIA

SEQ ID NO: 37069 - protein, 10 aa, Artificial Sequence
  Description of Artificial Sequence: Synthetic epitope
QKTASKSANK

SEQ ID NO: 37070 - protein, 10 aa, Artificial Sequence
  Description of Artificial Sequence: Synthetic epitope
QKTATKNDTE

SEQ ID NO: 37071 - protein, 10 aa, Artificial Sequence
  Description of Artificial Sequence: Synthetic epitope
QKTELQQIGK

SEQ ID NO: 37072 - protein, 10 aa, Artificial Sequence
  Description of Artificial Sequence: Synthetic epitope
QKTESVDNEG

SEQ ID NO: 37073 - protein, 10 aa, Artificial Sequence
  Description of Artificial Sequence: Synthetic epitope
QKTEVSTVSS

SEQ ID NO: 37074 - protein, 10 aa, Artificial Sequence
  Description of Artificial Sequence: Synthetic epitope
QKTFTVSQAG

SEQ ID NO: 37075 - protein, 10 aa, Artificial Sequence
  Description of Artificial Sequence: Synthetic epitope
QKTGEHKTML

SEQ ID NO: 37076 - protein, 10 aa, Artificial Sequence
  Description of Artificial Sequence: Synthetic epitope
QKTGKTNESQ

SEQ ID NO: 37077 - protein, 10 aa, Artificial Sequence
  Description of Artificial Sequence: Synthetic epitope
QKTHAAKTTS

SEQ ID NO: 37078 - protein, 10 aa, Artificial Sequence
  Description of Artificial Sequence: Synthetic epitope
QKTHKVETTG

SEQ ID NO: 37079 - protein, 10 aa, Artificial Sequence
  Description of Artificial Sequence: Synthetic epitope
QKTIYKLEEQ

SEQ ID NO: 37080 - protein, 10 aa, Artificial Sequence
  Description of Artificial Sequence: Synthetic epitope
QKTKKIETSA

SEQ ID NO: 37081 - protein, 10 aa, Artificial Sequence
  Description of Artificial Sequence: Synthetic epitope
QKTKMKRLQT

SEQ ID NO: 37082 - protein, 10 aa, Artificial Sequence
  Description of Artificial Sequence: Synthetic epitope
QKTLRPRFKI

SEQ ID NO: 37083 - protein, 10 aa, Artificial Sequence
  Description of Artificial Sequence: Synthetic epitope
QKTLSEKETE

SEQ ID NO: 37084 - protein, 10 aa, Artificial Sequence
  Description of Artificial Sequence: Synthetic epitope
QKTPEFKEPQ

SEQ ID NO: 37085 - protein, 10 aa, Artificial Sequence
  Description of Artificial Sequence: Synthetic epitope
QKTQTSLQAR

SEQ ID NO: 37086 - protein, 10 aa, Artificial Sequence
  Description of Artificial Sequence: Synthetic epitope
QKTRESEPLS

SEQ ID NO: 37087 - protein, 10 aa, Artificial Sequence
  Description of Artificial Sequence: Synthetic epitope
QKTRLQISQD

SEQ ID NO: 37088 - protein, 10 aa, Artificial Sequence
  Description of Artificial Sequence: Synthetic epitope
QKTRQNLDKK

SEQ ID NO: 37089 - protein, 10 aa, Artificial Sequence
  Description of Artificial Sequence: Synthetic epitope
QKTRSTKKLT

SEQ ID NO: 37090 - protein, 10 aa, Artificial Sequence
  Description of Artificial Sequence: Synthetic epitope
QKTRTGRLKK

SEQ ID NO: 37091 - protein, 10 aa, Artificial Sequence
  Description of Artificial Sequence: Synthetic epitope
QKTSEIVLRP

SEQ ID NO: 37092 - protein, 10 aa, Artificial Sequence
  Description of Artificial Sequence: Synthetic epitope
QKTSLAQEKE

SEQ ID NO: 37093 - protein, 10 aa, Artificial Sequence
  Description of Artificial Sequence: Synthetic epitope
QKTSLGKITG

SEQ ID NO: 37094 - protein, 10 aa, Artificial Sequence
  Description of Artificial Sequence: Synthetic epitope
QKTSLTLSLQ

SEQ ID NO: 37095 - protein, 10 aa, Artificial Sequence
  Description of Artificial Sequence: Synthetic epitope
QKTSSELGKG

SEQ ID NO: 37096 - protein, 10 aa, Artificial Sequence
  Description of Artificial Sequence: Synthetic epitope
QKTSVSMNTD

SEQ ID NO: 37097 - protein, 10 aa, Artificial Sequence
  Description of Artificial Sequence: Synthetic epitope
QKTVAEQDMK

SEQ ID NO: 37098 - protein, 10 aa, Artificial Sequence
  Description of Artificial Sequence: Synthetic epitope
QKTVATGEIM

SEQ ID NO: 37099 - protein, 10 aa, Artificial Sequence
  Description of Artificial Sequence: Synthetic epitope
QKTVKDSYHI

SEQ ID NO: 37100 - protein, 10 aa, Artificial Sequence
  Description of Artificial Sequence: Synthetic epitope
QKTVMSNSTS

SEQ ID NO: 37101 - protein, 10 aa, Artificial Sequence
  Description of Artificial Sequence: Synthetic epitope
QKTVTPAYNR

SEQ ID NO: 37102 - protein, 10 aa, Artificial Sequence
  Description of Artificial Sequence: Synthetic epitope
QKTYTSTKEA

SEQ ID NO: 37103 - protein, 10 aa, Artificial Sequence
  Description of Artificial Sequence: Synthetic epitope
QKVADMATNT

SEQ ID NO: 37104 - protein, 10 aa, Artificial Sequence
  Description of Artificial Sequence: Synthetic epitope
QKVADMATNT

SEQ ID NO: 37105 - protein, 10 aa, Artificial Sequence
  Description of Artificial Sequence: Synthetic epitope
QKVAHALAEG

SEQ ID NO: 37106 - protein, 10 aa, Artificial Sequence
  Description of Artificial Sequence: Synthetic epitope
QKVAISEFSR

SEQ ID NO: 37107 - protein, 10 aa, Artificial Sequence
  Description of Artificial Sequence: Synthetic epitope
QKVATMLSLE

SEQ ID NO: 37108 - protein, 10 aa, Artificial Sequence
  Description of Artificial Sequence: Synthetic epitope
QKVERFLKLS

SEQ ID NO: 37109 - protein, 10 aa, Artificial Sequence
  Description of Artificial Sequence: Synthetic epitope
QKVEVVSEAS

SEQ ID NO: 37110 - protein, 10 aa, Artificial Sequence
  Description of Artificial Sequence: Synthetic epitope
QKVFEASSLE

SEQ ID NO: 37111 - protein, 10 aa, Artificial Sequence
  Description of Artificial Sequence: Synthetic epitope
QKVFNRITDA

SEQ ID NO: 37112 - protein, 10 aa, Artificial Sequence
  Description of Artificial Sequence: Synthetic epitope
QKVHRTAKQV

SEQ ID NO: 37113 - protein, 10 aa, Artificial Sequence
  Description of Artificial Sequence: Synthetic epitope
QKVHSSLSSV

SEQ ID NO: 37114 - protein, 10 aa, Artificial Sequence
  Description of Artificial Sequence: Synthetic epitope
QKVIAKTGMD

SEQ ID NO: 37115 - protein, 10 aa, Artificial Sequence
  Description of Artificial Sequence: Synthetic epitope
QKVIKRAEVS

SEQ ID NO: 37116 - protein, 10 aa, Artificial Sequence
  Description of Artificial Sequence: Synthetic epitope
QKVIQSIEQQ

SEQ ID NO: 37117 - protein, 10 aa, Artificial Sequence
  Description of Artificial Sequence: Synthetic epitope
QKVKAELEEA

SEQ ID NO: 37118 - protein, 10 aa, Artificial Sequence
  Description of Artificial Sequence: Synthetic epitope
QKVKQLSNSI

SEQ ID NO: 37119 - protein, 10 aa, Artificial Sequence
  Description of Artificial Sequence: Synthetic epitope
QKVLAEQDSA

SEQ ID NO: 37120 - protein, 10 aa, Artificial Sequence
  Description of Artificial Sequence: Synthetic epitope
QKVLGSVSLK

SEQ ID NO: 37121 - protein, 10 aa, Artificial Sequence
  Description of Artificial Sequence: Synthetic epitope
QKVLMVREAE

SEQ ID NO: 37122 - protein, 10 aa, Artificial Sequence
  Description of Artificial Sequence: Synthetic epitope
QKVMAAIKQQ

SEQ ID NO: 37123 - protein, 10 aa, Artificial Sequence
  Description of Artificial Sequence: Synthetic epitope
QKVNATNFQA

SEQ ID NO: 37124 - protein, 10 aa, Artificial Sequence
  Description of Artificial Sequence: Synthetic epitope
QKVPHKLNNP

SEQ ID NO: 37125 - protein, 10 aa, Artificial Sequence
  Description of Artificial Sequence: Synthetic epitope
QKVQKNKELV

SEQ ID NO: 37126 - protein, 10 aa, Artificial Sequence
  Description of Artificial Sequence: Synthetic epitope
QKVQNSKMSE

SEQ ID NO: 37127 - protein, 10 aa, Artificial Sequence
  Description of Artificial Sequence: Synthetic epitope
QKVQSLQATF

SEQ ID NO: 37128 - protein, 10 aa, Artificial Sequence
  Description of Artificial Sequence: Synthetic epitope
QKVSAKFFSE

SEQ ID NO: 37129 - protein, 10 aa, Artificial Sequence
  Description of Artificial Sequence: Synthetic epitope
QKVSKKTGPR

SEQ ID NO: 37130 - protein, 10 aa, Artificial Sequence
  Description of Artificial Sequence: Synthetic epitope
QKVSNTQYHE

SEQ ID NO: 37131 - protein, 10 aa, Artificial Sequence
  Description of Artificial Sequence: Synthetic epitope
QKVSQVYVAI

SEQ ID NO: 37132 - protein, 10 aa, Artificial Sequence
  Description of Artificial Sequence: Synthetic epitope
QKVSTQLKTN

SEQ ID NO: 37133 - protein, 10 aa, Artificial Sequence
  Description of Artificial Sequence: Synthetic epitope
QKVTLTAAEA

SEQ ID NO: 37134 - protein, 10 aa, Artificial Sequence
  Description of Artificial Sequence: Synthetic epitope
QKVTQAQTEI

SEQ ID NO: 37135 - protein, 10 aa, Artificial Sequence
  Description of Artificial Sequence: Synthetic epitope
QKVTVRAREL

SEQ ID NO: 37136 - protein, 10 aa, Artificial Sequence
  Description of Artificial Sequence: Synthetic epitope
QKVVKVAEYE

SEQ ID NO: 37137 - protein, 10 aa, Artificial Sequence
  Description of Artificial Sequence: Synthetic epitope
QKVVPSASQL

SEQ ID NO: 37138 - protein, 10 aa, Artificial Sequence
  Description of Artificial Sequence: Synthetic epitope
QKVVTLRKQQ

SEQ ID NO: 37139 - protein, 10 aa, Artificial Sequence
  Description of Artificial Sequence: Synthetic epitope
QKWAHEVWDI

SEQ ID NO: 37140 - protein, 10 aa, Artificial Sequence
  Description of Artificial Sequence: Synthetic epitope
QKWDQKSQKP

SEQ ID NO: 37141 - protein, 10 aa, Artificial Sequence
  Description of Artificial Sequence: Synthetic epitope
QKWGMTIRFD

SEQ ID NO: 37142 - protein, 10 aa, Artificial Sequence
  Description of Artificial Sequence: Synthetic epitope
QKWIRTRKLK

SEQ ID NO: 37143 - protein, 10 aa, Artificial Sequence
  Description of Artificial Sequence: Synthetic epitope
QKWNDWQALM

SEQ ID NO: 37144 - protein, 10 aa, Artificial Sequence
  Description of Artificial Sequence: Synthetic epitope
QKWPFQPSRD

SEQ ID NO: 37145 - protein, 10 aa, Artificial Sequence
  Description of Artificial Sequence: Synthetic epitope
QKYEEALQAQ

SEQ ID NO: 37146 - protein, 10 aa, Artificial Sequence
  Description of Artificial Sequence: Synthetic epitope
QKYQEETSFA

SEQ ID NO: 37147 - protein, 10 aa, Artificial Sequence
  Description of Artificial Sequence: Synthetic epitope
QKYQVSEISI

SEQ ID NO: 37148 - protein, 10 aa, Artificial Sequence
  Description of Artificial Sequence: Synthetic epitope
QKYRLSQLYK

SEQ ID NO: 37149 - protein, 10 aa, Artificial Sequence
  Description of Artificial Sequence: Synthetic epitope
QKYSPWGMKK

SEQ ID NO: 37150 - protein, 10 aa, Artificial Sequence
  Description of Artificial Sequence: Synthetic epitope
QKYTKYSKHD

SEQ ID NO: 37151 - protein, 10 aa, Artificial Sequence
  Description of Artificial Sequence: Synthetic epitope
QKYTLKINHD

SEQ ID NO: 37152 - protein, 10 aa, Artificial Sequence
  Description of Artificial Sequence: Synthetic epitope
QKYTPHMDNQ

SEQ ID NO: 37153 - protein, 10 aa, Artificial Sequence
  Description of Artificial Sequence: Synthetic epitope
QKYTQQKVSP

SEQ ID NO: 37154 - protein, 10 aa, Artificial Sequence
  Description of Artificial Sequence: Synthetic epitope
QKYTRLQTPS

SEQ ID NO: 37155 - protein, 10 aa, Artificial Sequence
  Description of Artificial Sequence: Synthetic epitope
QKYWDLMNLS

SEQ ID NO: 37156 - protein, 10 aa, Artificial Sequence
  Description of Artificial Sequence: Synthetic epitope
QLAAVHLSKS

SEQ ID NO: 37157 - protein, 10 aa, Artificial Sequence
  Description of Artificial Sequence: Synthetic epitope
QLAAYGILEK

SEQ ID NO: 37158 - protein, 10 aa, Artificial Sequence
  Description of Artificial Sequence: Synthetic epitope
QLADQSQVAE

SEQ ID NO: 37159 - protein, 10 aa, Artificial Sequence
  Description of Artificial Sequence: Synthetic epitope
QLAEGLARQL

SEQ ID NO: 37160 - protein, 10 aa, Artificial Sequence
  Description of Artificial Sequence: Synthetic epitope
QLAESKTDEL

SEQ ID NO: 37161 - protein, 10 aa, Artificial Sequence
  Description of Artificial Sequence: Synthetic epitope
QLAETEREGG

SEQ ID NO: 37162 - protein, 10 aa, Artificial Sequence
  Description of Artificial Sequence: Synthetic epitope
QLAFAGKKEH

SEQ ID NO: 37163 - protein, 10 aa, Artificial Sequence
  Description of Artificial Sequence: Synthetic epitope
QLAGDSKIFP

SEQ ID NO: 37164 - protein, 10 aa, Artificial Sequence
  Description of Artificial Sequence: Synthetic epitope
QLAHMVKEQE

SEQ ID NO: 37165 - protein, 10 aa, Artificial Sequence
  Description of Artificial Sequence: Synthetic epitope
QLAKATVPQE

SEQ ID NO: 37166 - protein, 10 aa, Artificial Sequence
  Description of Artificial Sequence: Synthetic epitope
QLAKEQSMSS

SEQ ID NO: 37167 - protein, 10 aa, Artificial Sequence
  Description of Artificial Sequence: Synthetic epitope
QLAKTLERSV

SEQ ID NO: 37168 - protein, 10 aa, Artificial Sequence
  Description of Artificial Sequence: Synthetic epitope
QLALEEAEAA

SEQ ID NO: 37169 - protein, 10 aa, Artificial Sequence
  Description of Artificial Sequence: Synthetic epitope
QLALELLASA

SEQ ID NO: 37170 - protein, 10 aa, Artificial Sequence
  Description of Artificial Sequence: Synthetic epitope
QLALKEAAGA

SEQ ID NO: 37171 - protein, 10 aa, Artificial Sequence
  Description of Artificial Sequence: Synthetic epitope
QLALRSAAPS

SEQ ID NO: 37172 - protein, 10 aa, Artificial Sequence
  Description of Artificial Sequence: Synthetic epitope
QLAMELSAKE

SEQ ID NO: 37173 - protein, 10 aa, Artificial Sequence
  Description of Artificial Sequence: Synthetic epitope
QLAMVQASPG

SEQ ID NO: 37174 - protein, 10 aa, Artificial Sequence
  Description of Artificial Sequence: Synthetic epitope
QLANDSVNRL

SEQ ID NO: 37175 - protein, 10 aa, Artificial Sequence
  Description of Artificial Sequence: Synthetic epitope
QLANPIVSSG

SEQ ID NO: 37176 - protein, 10 aa, Artificial Sequence
  Description of Artificial Sequence: Synthetic epitope
QLANQEKTQA

SEQ ID NO: 37177 - protein, 10 aa, Artificial Sequence
  Description of Artificial Sequence: Synthetic epitope
QLANSVMQTL

SEQ ID NO: 37178 - protein, 10 aa, Artificial Sequence
  Description of Artificial Sequence: Synthetic epitope
QLAQALLVKQ

SEQ ID NO: 37179 - protein, 10 aa, Artificial Sequence
  Description of Artificial Sequence: Synthetic epitope
QLAQASQTEQ

SEQ ID NO: 37180 - protein, 10 aa, Artificial Sequence
  Description of Artificial Sequence: Synthetic epitope
QLAQLQSQPV

SEQ ID NO: 37181 - protein, 10 aa, Artificial Sequence
  Description of Artificial Sequence: Synthetic epitope
QLAQTTMRSE

SEQ ID NO: 37182 - protein, 10 aa, Artificial Sequence
  Description of Artificial Sequence: Synthetic epitope
QLAQYLLAEE

SEQ ID NO: 37183 - protein, 10 aa, Artificial Sequence
  Description of Artificial Sequence: Synthetic epitope
QLARAVKPHQ

SEQ ID NO: 37184 - protein, 10 aa, Artificial Sequence
  Description of Artificial Sequence: Synthetic epitope
QLARLELELK

SEQ ID NO: 37185 - protein, 10 aa, Artificial Sequence
  Description of Artificial Sequence: Synthetic epitope
QLARRQDSDL

SEQ ID NO: 37186 - protein, 10 aa, Artificial Sequence
  Description of Artificial Sequence: Synthetic epitope
QLASKLSFRN

SEQ ID NO: 37187 - protein, 10 aa, Artificial Sequence
  Description of Artificial Sequence: Synthetic epitope
QLATNTKVSE

SEQ ID NO: 37188 - protein, 10 aa, Artificial Sequence
  Description of Artificial Sequence: Synthetic epitope
QLATTVSQQE

SEQ ID NO: 37189 - protein, 10 aa, Artificial Sequence
  Description of Artificial Sequence: Synthetic epitope
QLAVEAESEQ

SEQ ID NO: 37190 - protein, 10 aa, Artificial Sequence
  Description of Artificial Sequence: Synthetic epitope
QLAWAHTNAT

SEQ ID NO: 37191 - protein, 10 aa, Artificial Sequence
  Description of Artificial Sequence: Synthetic epitope
QLDAASVSSI

SEQ ID NO: 37192 - protein, 10 aa, Artificial Sequence
  Description of Artificial Sequence: Synthetic epitope
QLDGLNASQI

SEQ ID NO: 37193 - protein, 10 aa, Artificial Sequence
  Description of Artificial Sequence: Synthetic epitope
QLDIQSDKIR

SEQ ID NO: 37194 - protein, 10 aa, Artificial Sequence
  Description of Artificial Sequence: Synthetic epitope
QLDPNKSLLE

SEQ ID NO: 37195 - protein, 10 aa, Artificial Sequence
  Description of Artificial Sequence: Synthetic epitope
QLDSKDNSES

SEQ ID NO: 37196 - protein, 10 aa, Artificial Sequence
  Description of Artificial Sequence: Synthetic epitope
QLDSSAVAPH

SEQ ID NO: 37197 - protein, 10 aa, Artificial Sequence
  Description of Artificial Sequence: Synthetic epitope
QLDTKLNDLK

SEQ ID NO: 37198 - protein, 10 aa, Artificial Sequence
  Description of Artificial Sequence: Synthetic epitope
QLEAAESIAF

SEQ ID NO: 37199 - protein, 10 aa, Artificial Sequence
  Description of Artificial Sequence: Synthetic epitope
QLEAALAALQ

SEQ ID NO: 37200 - protein, 10 aa, Artificial Sequence
  Description of Artificial Sequence: Synthetic epitope
QLEAEFVGVS

SEQ ID NO: 37201 - protein, 10 aa, Artificial Sequence
  Description of Artificial Sequence: Synthetic epitope
QLEDLTLKKE

SEQ ID NO: 37202 - protein, 10 aa, Artificial Sequence
  Description of Artificial Sequence: Synthetic epitope
QLEEQELKQK

SEQ ID NO: 37203 - protein, 10 aa, Artificial Sequence
  Description of Artificial Sequence: Synthetic epitope
QLEEQQTLEE

SEQ ID NO: 37204 - protein, 10 aa, Artificial Sequence
  Description of Artificial Sequence: Synthetic epitope
QLEESLKSQE

SEQ ID NO: 37205 - protein, 10 aa, Artificial Sequence
  Description of Artificial Sequence: Synthetic epitope
QLEETKTEEG

SEQ ID NO: 37206 - protein, 10 aa, Artificial Sequence
  Description of Artificial Sequence: Synthetic epitope
QLEETKTEEG

SEQ ID NO: 37207 - protein, 10 aa, Artificial Sequence
  Description of Artificial Sequence: Synthetic epitope
QLEHTSTQAL

SEQ ID NO: 37208 - protein, 10 aa, Artificial Sequence
  Description of Artificial Sequence: Synthetic epitope
QLENEMMRVG

SEQ ID NO: 37209 - protein, 10 aa, Artificial Sequence
  Description of Artificial Sequence: Synthetic epitope
QLEQKTENKN

SEQ ID NO: 37210 - protein, 10 aa, Artificial Sequence
  Description of Artificial Sequence: Synthetic epitope
QLEQQVATGP

SEQ ID NO: 37211 - protein, 10 aa, Artificial Sequence
  Description of Artificial Sequence: Synthetic epitope
QLEQSALQAE

SEQ ID NO: 37212 - protein, 10 aa, Artificial Sequence
  Description of Artificial Sequence: Synthetic epitope
QLERAIVDAA

SEQ ID NO: 37213 - protein, 10 aa, Artificial Sequence
  Description of Artificial Sequence: Synthetic epitope
QLETTAFDVQ

SEQ ID NO: 37214 - protein, 10 aa, Artificial Sequence
  Description of Artificial Sequence: Synthetic epitope
QLEVKARRDE

SEQ ID NO: 37215 - protein, 10 aa, Artificial Sequence
  Description of Artificial Sequence: Synthetic epitope
QLFAAPYRDL

SEQ ID NO: 37216 - protein, 10 aa, Artificial Sequence
  Description of Artificial Sequence: Synthetic epitope
QLFAKSDTSL

SEQ ID NO: 37217 - protein, 10 aa, Artificial Sequence
  Description of Artificial Sequence: Synthetic epitope
QLFDAPVTAE

SEQ ID NO: 37218 - protein, 10 aa, Artificial Sequence
  Description of Artificial Sequence: Synthetic epitope
QLFEAKLDKG

SEQ ID NO: 37219 - protein, 10 aa, Artificial Sequence
  Description of Artificial Sequence: Synthetic epitope
QLFEKSEAPT

SEQ ID NO: 37220 - protein, 10 aa, Artificial Sequence
  Description of Artificial Sequence: Synthetic epitope
QLFSEKISGA

SEQ ID NO: 37221 - protein, 10 aa, Artificial Sequence
  Description of Artificial Sequence: Synthetic epitope
QLGAATQARP

SEQ ID NO: 37222 - protein, 10 aa, Artificial Sequence
  Description of Artificial Sequence: Synthetic epitope
QLGASATLVR

SEQ ID NO: 37223 - protein, 10 aa, Artificial Sequence
  Description of Artificial Sequence: Synthetic epitope
QLGLATAQTL

SEQ ID NO: 37224 - protein, 10 aa, Artificial Sequence
  Description of Artificial Sequence: Synthetic epitope
QLGLQVEGLR

SEQ ID NO: 37225 - protein, 10 aa, Artificial Sequence
  Description of Artificial Sequence: Synthetic epitope
QLGQLASMES

SEQ ID NO: 37226 - protein, 10 aa, Artificial Sequence
  Description of Artificial Sequence: Synthetic epitope
QLGQLNVPSV

SEQ ID NO: 37227 - protein, 10 aa, Artificial Sequence
  Description of Artificial Sequence: Synthetic epitope
QLGQSEGYQD

SEQ ID NO: 37228 - protein, 10 aa, Artificial Sequence
  Description of Artificial Sequence: Synthetic epitope
QLGRRALALH

SEQ ID NO: 37229 - protein, 10 aa, Artificial Sequence
  Description of Artificial Sequence: Synthetic epitope
QLGSQLSAMQ

SEQ ID NO: 37230 - protein, 10 aa, Artificial Sequence
  Description of Artificial Sequence: Synthetic epitope
QLGTFKQDSA

SEQ ID NO: 37231 - protein, 10 aa, Artificial Sequence
  Description of Artificial Sequence: Synthetic epitope
QLGTTLDMGE

SEQ ID NO: 37232 - protein, 10 aa, Artificial Sequence
  Description of Artificial Sequence: Synthetic epitope
QLHEFSSPSH

SEQ ID NO: 37233 - protein, 10 aa, Artificial Sequence
  Description of Artificial Sequence: Synthetic epitope
QLHGKKEAYD

SEQ ID NO: 37234 - protein, 10 aa, Artificial Sequence
  Description of Artificial Sequence: Synthetic epitope
QLHKINAEGT

SEQ ID NO: 37235 - protein, 10 aa, Artificial Sequence
  Description of Artificial Sequence: Synthetic epitope
QLHLQKSREA

SEQ ID NO: 37236 - protein, 10 aa, Artificial Sequence
  Description of Artificial Sequence: Synthetic epitope
QLHMNRTAMR

SEQ ID NO: 37237 - protein, 10 aa, Artificial Sequence
  Description of Artificial Sequence: Synthetic epitope
QLHPKMRTRL

SEQ ID NO: 37238 - protein, 10 aa, Artificial Sequence
  Description of Artificial Sequence: Synthetic epitope
QLHRENIQRI

SEQ ID NO: 37239 - protein, 10 aa, Artificial Sequence
  Description of Artificial Sequence: Synthetic epitope
QLIAFKERDI

SEQ ID NO: 37240 - protein, 10 aa, Artificial Sequence
  Description of Artificial Sequence: Synthetic epitope
QLIAQSLLEK

SEQ ID NO: 37241 - protein, 10 aa, Artificial Sequence
  Description of Artificial Sequence: Synthetic epitope
QLIDSFTSIM

SEQ ID NO: 37242 - protein, 10 aa, Artificial Sequence
  Description of Artificial Sequence: Synthetic epitope
QLIKAQQSKQ

SEQ ID NO: 37243 - protein, 10 aa, Artificial Sequence
  Description of Artificial Sequence: Synthetic epitope
QLIKEAVEMK

SEQ ID NO: 37244 - protein, 10 aa, Artificial Sequence
  Description of Artificial Sequence: Synthetic epitope
QLIKIIKIMQ

SEQ ID NO: 37245 - protein, 10 aa, Artificial Sequence
  Description of Artificial Sequence: Synthetic epitope
QLIKMEKKEE

SEQ ID NO: 37246 - protein, 10 aa, Artificial Sequence
  Description of Artificial Sequence: Synthetic epitope
QLIKQQSIAA

SEQ ID NO: 37247 - protein, 10 aa, Artificial Sequence
  Description of Artificial Sequence: Synthetic epitope
QLIKSTVLSA

SEQ ID NO: 37248 - protein, 10 aa, Artificial Sequence
  Description of Artificial Sequence: Synthetic epitope
QLILHEYKIF

SEQ ID NO: 37249 - protein, 10 aa, Artificial Sequence
  Description of Artificial Sequence: Synthetic epitope
QLILSVAGTV

SEQ ID NO: 37250 - protein, 10 aa, Artificial Sequence
  Description of Artificial Sequence: Synthetic epitope
QLILVNTIPA

SEQ ID NO: 37251 - protein, 10 aa, Artificial Sequence
  Description of Artificial Sequence: Synthetic epitope
QLIPLHNQTH

SEQ ID NO: 37252 - protein, 10 aa, Artificial Sequence
  Description of Artificial Sequence: Synthetic epitope
QLISKAIHLP

SEQ ID NO: 37253 - protein, 10 aa, Artificial Sequence
  Description of Artificial Sequence: Synthetic epitope
QLISNLTQAS

SEQ ID NO: 37254 - protein, 10 aa, Artificial Sequence
  Description of Artificial Sequence: Synthetic epitope
QLITQSPSQR

SEQ ID NO: 37255 - protein, 10 aa, Artificial Sequence
  Description of Artificial Sequence: Synthetic epitope
QLIVQSAEDP

SEQ ID NO: 37256 - protein, 10 aa, Artificial Sequence
  Description of Artificial Sequence: Synthetic epitope
QLIVQSAEDP

SEQ ID NO: 37257 - protein, 10 aa, Artificial Sequence
  Description of Artificial Sequence: Synthetic epitope
QLIWQQMKSE

SEQ ID NO: 37258 - protein, 10 aa, Artificial Sequence
  Description of Artificial Sequence: Synthetic epitope
QLKAKQLTQD

SEQ ID NO: 37259 - protein, 10 aa, Artificial Sequence
  Description of Artificial Sequence: Synthetic epitope
QLKAQYKSLI

SEQ ID NO: 37260 - protein, 10 aa, Artificial Sequence
  Description of Artificial Sequence: Synthetic epitope
QLKARMVSKS

SEQ ID NO: 37261 - protein, 10 aa, Artificial Sequence
  Description of Artificial Sequence: Synthetic epitope
QLKDATSNEQ

SEQ ID NO: 37262 - protein, 10 aa, Artificial Sequence
  Description of Artificial Sequence: Synthetic epitope
QLKDEEMIGP

SEQ ID NO: 37263 - protein, 10 aa, Artificial Sequence
  Description of Artificial Sequence: Synthetic epitope
QLKDREKNAA

SEQ ID NO: 37264 - protein, 10 aa, Artificial Sequence
  Description of Artificial Sequence: Synthetic epitope
QLKDSKQILS

SEQ ID NO: 37265 - protein, 10 aa, Artificial Sequence
  Description of Artificial Sequence: Synthetic epitope
QLKDTYETNT

SEQ ID NO: 37266 - protein, 10 aa, Artificial Sequence
  Description of Artificial Sequence: Synthetic epitope
QLKEEKKNSI

SEQ ID NO: 37267 - protein, 10 aa, Artificial Sequence
  Description of Artificial Sequence: Synthetic epitope
QLKGSTLKKA

SEQ ID NO: 37268 - protein, 10 aa, Artificial Sequence
  Description of Artificial Sequence: Synthetic epitope
QLKIKEVTLG

SEQ ID NO: 37269 - protein, 10 aa, Artificial Sequence
  Description of Artificial Sequence: Synthetic epitope
QLKKLKAETL

SEQ ID NO: 37270 - protein, 10 aa, Artificial Sequence
  Description of Artificial Sequence: Synthetic epitope
QLKKTSHNLK

SEQ ID NO: 37271 - protein, 10 aa, Artificial Sequence
  Description of Artificial Sequence: Synthetic epitope
QLKLEGFALM

SEQ ID NO: 37272 - protein, 10 aa, Artificial Sequence
  Description of Artificial Sequence: Synthetic epitope
QLKLSSKGQK

SEQ ID NO: 37273 - protein, 10 aa, Artificial Sequence
  Description of Artificial Sequence: Synthetic epitope
QLKLTKANEN

SEQ ID NO: 37274 - protein, 10 aa, Artificial Sequence
  Description of Artificial Sequence: Synthetic epitope
QLKMDRSQQT

SEQ ID NO: 37275 - protein, 10 aa, Artificial Sequence
  Description of Artificial Sequence: Synthetic epitope
QLKMSDLEKQ

SEQ ID NO: 37276 - protein, 10 aa, Artificial Sequence
  Description of Artificial Sequence: Synthetic epitope
QLKNNLKGPI

SEQ ID NO: 37277 - protein, 10 aa, Artificial Sequence
  Description of Artificial Sequence: Synthetic epitope
QLKQPYTETK

SEQ ID NO: 37278 - protein, 10 aa, Artificial Sequence
  Description of Artificial Sequence: Synthetic epitope
QLKQQSLFSE

SEQ ID NO: 37279 - protein, 10 aa, Artificial Sequence
  Description of Artificial Sequence: Synthetic epitope
QLKQSKRVRD

SEQ ID NO: 37280 - protein, 10 aa, Artificial Sequence
  Description of Artificial Sequence: Synthetic epitope
QLKRASYAST

SEQ ID NO: 37281 - protein, 10 aa, Artificial Sequence
  Description of Artificial Sequence: Synthetic epitope
QLKSEESKTF

SEQ ID NO: 37282 - protein, 10 aa, Artificial Sequence
  Description of Artificial Sequence: Synthetic epitope
QLKSSEESAD

SEQ ID NO: 37283 - protein, 10 aa, Artificial Sequence
  Description of Artificial Sequence: Synthetic epitope
QLKVMKSTLV

SEQ ID NO: 37284 - protein, 10 aa, Artificial Sequence
  Description of Artificial Sequence: Synthetic epitope
QLKVVQTKYV

SEQ ID NO: 37285 - protein, 10 aa, Artificial Sequence
  Description of Artificial Sequence: Synthetic epitope
QLLAASLHLA

SEQ ID NO: 37286 - protein, 10 aa, Artificial Sequence
  Description of Artificial Sequence: Synthetic epitope
QLLAAVVGPR

SEQ ID NO: 37287 - protein, 10 aa, Artificial Sequence
  Description of Artificial Sequence: Synthetic epitope
QLLAMALRLR

SEQ ID NO: 37288 - protein, 10 aa, Artificial Sequence
  Description of Artificial Sequence: Synthetic epitope
QLLASLQLQE

SEQ ID NO: 37289 - protein, 10 aa, Artificial Sequence
  Description of Artificial Sequence: Synthetic epitope
QLLASTSVES

SEQ ID NO: 37290 - protein, 10 aa, Artificial Sequence
  Description of Artificial Sequence: Synthetic epitope
QLLAVLRLDS

SEQ ID NO: 37291 - protein, 10 aa, Artificial Sequence
  Description of Artificial Sequence: Synthetic epitope
QLLDNSKASK

SEQ ID NO: 37292 - protein, 10 aa, Artificial Sequence
  Description of Artificial Sequence: Synthetic epitope
QLLELSKESS

SEQ ID NO: 37293 - protein, 10 aa, Artificial Sequence
  Description of Artificial Sequence: Synthetic epitope
QLLETAVARG

SEQ ID NO: 37294 - protein, 10 aa, Artificial Sequence
  Description of Artificial Sequence: Synthetic epitope
QLLGALQTME

SEQ ID NO: 37295 - protein, 10 aa, Artificial Sequence
  Description of Artificial Sequence: Synthetic epitope
QLLIKASKAV

SEQ ID NO: 37296 - protein, 10 aa, Artificial Sequence
  Description of Artificial Sequence: Synthetic epitope
QLLKAGKAKE

SEQ ID NO: 37297 - protein, 10 aa, Artificial Sequence
  Description of Artificial Sequence: Synthetic epitope
QLLKINNSKH

SEQ ID NO: 37298 - protein, 10 aa, Artificial Sequence
  Description of Artificial Sequence: Synthetic epitope
QLLKSALADV

SEQ ID NO: 37299 - protein, 10 aa, Artificial Sequence
  Description of Artificial Sequence: Synthetic epitope
QLLKVAQASS

SEQ ID NO: 37300 - protein, 10 aa, Artificial Sequence
  Description of Artificial Sequence: Synthetic epitope
QLLMDKAKVK

SEQ ID NO: 37301 - protein, 10 aa, Artificial Sequence
  Description of Artificial Sequence: Synthetic epitope
QLLNEAVQAQ

SEQ ID NO: 37302 - protein, 10 aa, Artificial Sequence
  Description of Artificial Sequence: Synthetic epitope
QLLNSVQAKN

SEQ ID NO: 37303 - protein, 10 aa, Artificial Sequence
  Description of Artificial Sequence: Synthetic epitope
QLLNVEYNSQ

SEQ ID NO: 37304 - protein, 10 aa, Artificial Sequence
  Description of Artificial Sequence: Synthetic epitope
QLLQAKTQDE

SEQ ID NO: 37305 - protein, 10 aa, Artificial Sequence
  Description of Artificial Sequence: Synthetic epitope
QLLQFAAKNI

SEQ ID NO: 37306 - protein, 10 aa, Artificial Sequence
  Description of Artificial Sequence: Synthetic epitope
QLLQKAMSAL

SEQ ID NO: 37307 - protein, 10 aa, Artificial Sequence
  Description of Artificial Sequence: Synthetic epitope
QLLQKLTYNV

SEQ ID NO: 37308 - protein, 10 aa, Artificial Sequence
  Description of Artificial Sequence: Synthetic epitope
QLLQKNVRAQ

SEQ ID NO: 37309 - protein, 10 aa, Artificial Sequence
  Description of Artificial Sequence: Synthetic epitope
QLLQLVALEE

SEQ ID NO: 37310 - protein, 10 aa, Artificial Sequence
  Description of Artificial Sequence: Synthetic epitope
QLLQVQRTPE

SEQ ID NO: 37311 - protein, 10 aa, Artificial Sequence
  Description of Artificial Sequence: Synthetic epitope
QLLRAATGKA

SEQ ID NO: 37312 - protein, 10 aa, Artificial Sequence
  Description of Artificial Sequence: Synthetic epitope
QLLRDSSITS

SEQ ID NO: 37313 - protein, 10 aa, Artificial Sequence
  Description of Artificial Sequence: Synthetic epitope
QLLRNIASQT

SEQ ID NO: 37314 - protein, 10 aa, Artificial Sequence
  Description of Artificial Sequence: Synthetic epitope
QLLSEKIAFK

SEQ ID NO: 37315 - protein, 10 aa, Artificial Sequence
  Description of Artificial Sequence: Synthetic epitope
QLLSKANEED

SEQ ID NO: 37316 - protein, 10 aa, Artificial Sequence
  Description of Artificial Sequence: Synthetic epitope
QLLSKIIGEE

SEQ ID NO: 37317 - protein, 10 aa, Artificial Sequence
  Description of Artificial Sequence: Synthetic epitope
QLLTLSSELS

SEQ ID NO: 37318 - protein, 10 aa, Artificial Sequence
  Description of Artificial Sequence: Synthetic epitope
QLLVAINSTS

SEQ ID NO: 37319 - protein, 10 aa, Artificial Sequence
  Description of Artificial Sequence: Synthetic epitope
QLLVAKEGAE

SEQ ID NO: 37320 - protein, 10 aa, Artificial Sequence
  Description of Artificial Sequence: Synthetic epitope
QLLVESESLD

SEQ ID NO: 37321 - protein, 10 aa, Artificial Sequence
  Description of Artificial Sequence: Synthetic epitope
QLLVSQVRQL

SEQ ID NO: 37322 - protein, 10 aa, Artificial Sequence
  Description of Artificial Sequence: Synthetic epitope
QLLVSSLTKI

SEQ ID NO: 37323 - protein, 10 aa, Artificial Sequence
  Description of Artificial Sequence: Synthetic epitope
QLLVTKKLAH

SEQ ID NO: 37324 - protein, 10 aa, Artificial Sequence
  Description of Artificial Sequence: Synthetic epitope
QLLYQGMQEE

SEQ ID NO: 37325 - protein, 10 aa, Artificial Sequence
  Description of Artificial Sequence: Synthetic epitope
QLMDEQMARE

SEQ ID NO: 37326 - protein, 10 aa, Artificial Sequence
  Description of Artificial Sequence: Synthetic epitope
QLMLLSEEKQ

SEQ ID NO: 37327 - protein, 10 aa, Artificial Sequence
  Description of Artificial Sequence: Synthetic epitope
QLMQEVDRQR

SEQ ID NO: 37328 - protein, 10 aa, Artificial Sequence
  Description of Artificial Sequence: Synthetic epitope
QLMQLKEEQE

SEQ ID NO: 37329 - protein, 10 aa, Artificial Sequence
  Description of Artificial Sequence: Synthetic epitope
QLMQQNASQL

SEQ ID NO: 37330 - protein, 10 aa, Artificial Sequence
  Description of Artificial Sequence: Synthetic epitope
QLMVKAASAA

SEQ ID NO: 37331 - protein, 10 aa, Artificial Sequence
  Description of Artificial Sequence: Synthetic epitope
QLNEEIKLVE

SEQ ID NO: 37332 - protein, 10 aa, Artificial Sequence
  Description of Artificial Sequence: Synthetic epitope
QLNEKETPFE

SEQ ID NO: 37333 - protein, 10 aa, Artificial Sequence
  Description of Artificial Sequence: Synthetic epitope
QLNESTSATE

SEQ ID NO: 37334 - protein, 10 aa, Artificial Sequence
  Description of Artificial Sequence: Synthetic epitope
QLNETEAAFD

SEQ ID NO: 37335 - protein, 10 aa, Artificial Sequence
  Description of Artificial Sequence: Synthetic epitope
QLNIELEAAH

SEQ ID NO: 37336 - protein, 10 aa, Artificial Sequence
  Description of Artificial Sequence: Synthetic epitope
QLNKGLSSKN

SEQ ID NO: 37337 - protein, 10 aa, Artificial Sequence
  Description of Artificial Sequence: Synthetic epitope
QLNLKAEQSK

SEQ ID NO: 37338 - protein, 10 aa, Artificial Sequence
  Description of Artificial Sequence: Synthetic epitope
QLNQAAYDSL

SEQ ID NO: 37339 - protein, 10 aa, Artificial Sequence
  Description of Artificial Sequence: Synthetic epitope
QLNTMGPRDL

SEQ ID NO: 37340 - protein, 10 aa, Artificial Sequence
  Description of Artificial Sequence: Synthetic epitope
QLNTMTSTIP

SEQ ID NO: 37341 - protein, 10 aa, Artificial Sequence
  Description of Artificial Sequence: Synthetic epitope
QLNTSSAESE

SEQ ID NO: 37342 - protein, 10 aa, Artificial Sequence
  Description of Artificial Sequence: Synthetic epitope
QLPDKEERTK

SEQ ID NO: 37343 - protein, 10 aa, Artificial Sequence
  Description of Artificial Sequence: Synthetic epitope
QLPENGGWNA

SEQ ID NO: 37344 - protein, 10 aa, Artificial Sequence
  Description of Artificial Sequence: Synthetic epitope
QLPFKHVRDY

SEQ ID NO: 37345 - protein, 10 aa, Artificial Sequence
  Description of Artificial Sequence: Synthetic epitope
QLPKEQALSP

SEQ ID NO: 37346 - protein, 10 aa, Artificial Sequence
  Description of Artificial Sequence: Synthetic epitope
QLPLLSAMRE

SEQ ID NO: 37347 - protein, 10 aa, Artificial Sequence
  Description of Artificial Sequence: Synthetic epitope
QLPQSITKMQ

SEQ ID NO: 37348 - protein, 10 aa, Artificial Sequence
  Description of Artificial Sequence: Synthetic epitope
QLPRLSRRHL

SEQ ID NO: 37349 - protein, 10 aa, Artificial Sequence
  Description of Artificial Sequence: Synthetic epitope
QLPSVASAAK

SEQ ID NO: 37350 - protein, 10 aa, Artificial Sequence
  Description of Artificial Sequence: Synthetic epitope
QLPYRAKKFS

SEQ ID NO: 37351 - protein, 10 aa, Artificial Sequence
  Description of Artificial Sequence: Synthetic epitope
QLQASHRESE

SEQ ID NO: 37352 - protein, 10 aa, Artificial Sequence
  Description of Artificial Sequence: Synthetic epitope
QLQATINRAE

SEQ ID NO: 37353 - protein, 10 aa, Artificial Sequence
  Description of Artificial Sequence: Synthetic epitope
QLQDLVAMVQ

SEQ ID NO: 37354 - protein, 10 aa, Artificial Sequence
  Description of Artificial Sequence: Synthetic epitope
QLQDMITQND

SEQ ID NO: 37355 - protein, 10 aa, Artificial Sequence
  Description of Artificial Sequence: Synthetic epitope
QLQDRLTPME

SEQ ID NO: 37356 - protein, 10 aa, Artificial Sequence
  Description of Artificial Sequence: Synthetic epitope
QLQESAAKLH

SEQ ID NO: 37357 - protein, 10 aa, Artificial Sequence
  Description of Artificial Sequence: Synthetic epitope
QLQESQQMLG

SEQ ID NO: 37358 - protein, 10 aa, Artificial Sequence
  Description of Artificial Sequence: Synthetic epitope
QLQFIAKESD

SEQ ID NO: 37359 - protein, 10 aa, Artificial Sequence
  Description of Artificial Sequence: Synthetic epitope
QLQKGSDTEA

SEQ ID NO: 37360 - protein, 10 aa, Artificial Sequence
  Description of Artificial Sequence: Synthetic epitope
QLQLKKLKDE

SEQ ID NO: 37361 - protein, 10 aa, Artificial Sequence
  Description of Artificial Sequence: Synthetic epitope
QLQLNIGVEQ

SEQ ID NO: 37362 - protein, 10 aa, Artificial Sequence
  Description of Artificial Sequence: Synthetic epitope
QLQLQAASNF

SEQ ID NO: 37363 - protein, 10 aa, Artificial Sequence
  Description of Artificial Sequence: Synthetic epitope
QLQLQSLHAA

SEQ ID NO: 37364 - protein, 10 aa, Artificial Sequence
  Description of Artificial Sequence: Synthetic epitope
QLQNAETQTE

SEQ ID NO: 37365 - protein, 10 aa, Artificial Sequence
  Description of Artificial Sequence: Synthetic epitope
QLQQIQASLL

SEQ ID NO: 37366 - protein, 10 aa, Artificial Sequence
  Description of Artificial Sequence: Synthetic epitope
QLQQRQEDDK

SEQ ID NO: 37367 - protein, 10 aa, Artificial Sequence
  Description of Artificial Sequence: Synthetic epitope
QLQRGEALSN

SEQ ID NO: 37368 - protein, 10 aa, Artificial Sequence
  Description of Artificial Sequence: Synthetic epitope
QLQSEATQHK

SEQ ID NO: 37369 - protein, 10 aa, Artificial Sequence
  Description of Artificial Sequence: Synthetic epitope
QLQSMEDRME

SEQ ID NO: 37370 - protein, 10 aa, Artificial Sequence
  Description of Artificial Sequence: Synthetic epitope
QLQTELLENT

SEQ ID NO: 37371 - protein, 10 aa, Artificial Sequence
  Description of Artificial Sequence: Synthetic epitope
QLQTQEELSK

SEQ ID NO: 37372 - protein, 10 aa, Artificial Sequence
  Description of Artificial Sequence: Synthetic epitope
QLQTQQLRVL

SEQ ID NO: 37373 - protein, 10 aa, Artificial Sequence
  Description of Artificial Sequence: Synthetic epitope
QLQVLISSNE

SEQ ID NO: 37374 - protein, 10 aa, Artificial Sequence
  Description of Artificial Sequence: Synthetic epitope
QLQVRGAEAS

SEQ ID NO: 37375 - protein, 10 aa, Artificial Sequence
  Description of Artificial Sequence: Synthetic epitope
QLQVSLSAHQ

SEQ ID NO: 37376 - protein, 10 aa, Artificial Sequence
  Description of Artificial Sequence: Synthetic epitope
QLQVTGDASE

SEQ ID NO: 37377 - protein, 10 aa, Artificial Sequence
  Description of Artificial Sequence: Synthetic epitope
QLQVTQGDSK

SEQ ID NO: 37378 - protein, 10 aa, Artificial Sequence
  Description of Artificial Sequence: Synthetic epitope
QLQYRQIMEF

SEQ ID NO: 37379 - protein, 10 aa, Artificial Sequence
  Description of Artificial Sequence: Synthetic epitope
QLRAASSHEH

SEQ ID NO: 37380 - protein, 10 aa, Artificial Sequence
  Description of Artificial Sequence: Synthetic epitope
QLRAEDLNIA

SEQ ID NO: 37381 - protein, 10 aa, Artificial Sequence
  Description of Artificial Sequence: Synthetic epitope
QLRGEELSRR

SEQ ID NO: 37382 - protein, 10 aa, Artificial Sequence
  Description of Artificial Sequence: Synthetic epitope
QLRGGQIMTL

SEQ ID NO: 37383 - protein, 10 aa, Artificial Sequence
  Description of Artificial Sequence: Synthetic epitope
QLRGSNTQPN

SEQ ID NO: 37384 - protein, 10 aa, Artificial Sequence
  Description of Artificial Sequence: Synthetic epitope
QLRIELNAEK

SEQ ID NO: 37385 - protein, 10 aa, Artificial Sequence
  Description of Artificial Sequence: Synthetic epitope
QLRKANDQSG

SEQ ID NO: 37386 - protein, 10 aa, Artificial Sequence
  Description of Artificial Sequence: Synthetic epitope
QLRKHKILMK

SEQ ID NO: 37387 - protein, 10 aa, Artificial Sequence
  Description of Artificial Sequence: Synthetic epitope
QLRKSEMARK

SEQ ID NO: 37388 - protein, 10 aa, Artificial Sequence
  Description of Artificial Sequence: Synthetic epitope
QLRLLALQSA

SEQ ID NO: 37389 - protein, 10 aa, Artificial Sequence
  Description of Artificial Sequence: Synthetic epitope
QLRLTVEKSE

SEQ ID NO: 37390 - protein, 10 aa, Artificial Sequence
  Description of Artificial Sequence: Synthetic epitope
QLRMLASQAS

SEQ ID NO: 37391 - protein, 10 aa, Artificial Sequence
  Description of Artificial Sequence: Synthetic epitope
QLRRKARLGS

SEQ ID NO: 37392 - protein, 10 aa, Artificial Sequence
  Description of Artificial Sequence: Synthetic epitope
QLRRSKVSIE

SEQ ID NO: 37393 - protein, 10 aa, Artificial Sequence
  Description of Artificial Sequence: Synthetic epitope
QLRRTSIQEP

SEQ ID NO: 37394 - protein, 10 aa, Artificial Sequence
  Description of Artificial Sequence: Synthetic epitope
QLRSGASVTE

SEQ ID NO: 37395 - protein, 10 aa, Artificial Sequence
  Description of Artificial Sequence: Synthetic epitope
QLRSRAASAA

SEQ ID NO: 37396 - protein, 10 aa, Artificial Sequence
  Description of Artificial Sequence: Synthetic epitope
QLSADQKQKS

SEQ ID NO: 37397 - protein, 10 aa, Artificial Sequence
  Description of Artificial Sequence: Synthetic epitope
QLSALAASHR

SEQ ID NO: 37398 - protein, 10 aa, Artificial Sequence
  Description of Artificial Sequence: Synthetic epitope
QLSALSSDGE

SEQ ID NO: 37399 - protein, 10 aa, Artificial Sequence
  Description of Artificial Sequence: Synthetic epitope
QLSAPIVRVA

SEQ ID NO: 37400 - protein, 10 aa, Artificial Sequence
  Description of Artificial Sequence: Synthetic epitope
QLSASLAAFY

SEQ ID NO: 37401 - protein, 10 aa, Artificial Sequence
  Description of Artificial Sequence: Synthetic epitope
QLSDARNKEN

SEQ ID NO: 37402 - protein, 10 aa, Artificial Sequence
  Description of Artificial Sequence: Synthetic epitope
QLSESFKSKE

SEQ ID NO: 37403 - protein, 10 aa, Artificial Sequence
  Description of Artificial Sequence: Synthetic epitope
QLSESQVKSL

SEQ ID NO: 37404 - protein, 10 aa, Artificial Sequence
  Description of Artificial Sequence: Synthetic epitope
QLSESSTKDS

SEQ ID NO: 37405 - protein, 10 aa, Artificial Sequence
  Description of Artificial Sequence: Synthetic epitope
QLSGSIIEKE

SEQ ID NO: 37406 - protein, 10 aa, Artificial Sequence
  Description of Artificial Sequence: Synthetic epitope
QLSIENISMK

SEQ ID NO: 37407 - protein, 10 aa, Artificial Sequence
  Description of Artificial Sequence: Synthetic epitope
QLSKELFAKW

SEQ ID NO: 37408 - protein, 10 aa, Artificial Sequence
  Description of Artificial Sequence: Synthetic epitope
QLSKVKFQHE

SEQ ID NO: 37409 - protein, 10 aa, Artificial Sequence
  Description of Artificial Sequence: Synthetic epitope
QLSLAESEAS

SEQ ID NO: 37410 - protein, 10 aa, Artificial Sequence
  Description of Artificial Sequence: Synthetic epitope
QLSLEDLPAL

SEQ ID NO: 37411 - protein, 10 aa, Artificial Sequence
  Description of Artificial Sequence: Synthetic epitope
QLSLSRLSPE

SEQ ID NO: 37412 - protein, 10 aa, Artificial Sequence
  Description of Artificial Sequence: Synthetic epitope
QLSLSVDTAD

SEQ ID NO: 37413 - protein, 10 aa, Artificial Sequence
  Description of Artificial Sequence: Synthetic epitope
QLSMKFLEKG

SEQ ID NO: 37414 - protein, 10 aa, Artificial Sequence
  Description of Artificial Sequence: Synthetic epitope
QLSMNSPEMS

SEQ ID NO: 37415 - protein, 10 aa, Artificial Sequence
  Description of Artificial Sequence: Synthetic epitope
QLSNDIWLNV

SEQ ID NO: 37416 - protein, 10 aa, Artificial Sequence
  Description of Artificial Sequence: Synthetic epitope
QLSNLETTVG

SEQ ID NO: 37417 - protein, 10 aa, Artificial Sequence
  Description of Artificial Sequence: Synthetic epitope
QLSPLKGLSL

SEQ ID NO: 37418 - protein, 10 aa, Artificial Sequence
  Description of Artificial Sequence: Synthetic epitope
QLSPLSVTED

SEQ ID NO: 37419 - protein, 10 aa, Artificial Sequence
  Description of Artificial Sequence: Synthetic epitope
QLSPTHQING

SEQ ID NO: 37420 - protein, 10 aa, Artificial Sequence
  Description of Artificial Sequence: Synthetic epitope
QLSQGSEEYE

SEQ ID NO: 37421 - protein, 10 aa, Artificial Sequence
  Description of Artificial Sequence: Synthetic epitope
QLSRALKETE

SEQ ID NO: 37422 - protein, 10 aa, Artificial Sequence
  Description of Artificial Sequence: Synthetic epitope
QLSRASEVER

SEQ ID NO: 37423 - protein, 10 aa, Artificial Sequence
  Description of Artificial Sequence: Synthetic epitope
QLSSAVNIMN

SEQ ID NO: 37424 - protein, 10 aa, Artificial Sequence
  Description of Artificial Sequence: Synthetic epitope
QLSSEAAKRL

SEQ ID NO: 37425 - protein, 10 aa, Artificial Sequence
  Description of Artificial Sequence: Synthetic epitope
QLSSLGKSDS

SEQ ID NO: 37426 - protein, 10 aa, Artificial Sequence
  Description of Artificial Sequence: Synthetic epitope
QLSSQHEPTD

SEQ ID NO: 37427 - protein, 10 aa, Artificial Sequence
  Description of Artificial Sequence: Synthetic epitope
QLSSQSLSHN

SEQ ID NO: 37428 - protein, 10 aa, Artificial Sequence
  Description of Artificial Sequence: Synthetic epitope
QLSSRRLRSK

SEQ ID NO: 37429 - protein, 10 aa, Artificial Sequence
  Description of Artificial Sequence: Synthetic epitope
QLSTESKVTE

SEQ ID NO: 37430 - protein, 10 aa, Artificial Sequence
  Description of Artificial Sequence: Synthetic epitope
QLSTTESQAS

SEQ ID NO: 37431 - protein, 10 aa, Artificial Sequence
  Description of Artificial Sequence: Synthetic epitope
QLSVEVLTSH

SEQ ID NO: 37432 - protein, 10 aa, Artificial Sequence
  Description of Artificial Sequence: Synthetic epitope
QLSVTRSNQN

SEQ ID NO: 37433 - protein, 10 aa, Artificial Sequence
  Description of Artificial Sequence: Synthetic epitope
QLSYAQKAKY

SEQ ID NO: 37434 - protein, 10 aa, Artificial Sequence
  Description of Artificial Sequence: Synthetic epitope
QLSYEALQPE

SEQ ID NO: 37435 - protein, 10 aa, Artificial Sequence
  Description of Artificial Sequence: Synthetic epitope
QLTADMQALE

SEQ ID NO: 37436 - protein, 10 aa, Artificial Sequence
  Description of Artificial Sequence: Synthetic epitope
QLTAKKIRYQ

SEQ ID NO: 37437 - protein, 10 aa, Artificial Sequence
  Description of Artificial Sequence: Synthetic epitope
QLTAKSEAIE

SEQ ID NO: 37438 - protein, 10 aa, Artificial Sequence
  Description of Artificial Sequence: Synthetic epitope
QLTANSARLE

SEQ ID NO: 37439 - protein, 10 aa, Artificial Sequence
  Description of Artificial Sequence: Synthetic epitope
QLTENSFTRK

SEQ ID NO: 37440 - protein, 10 aa, Artificial Sequence
  Description of Artificial Sequence: Synthetic epitope
QLTFTAALEH

SEQ ID NO: 37441 - protein, 10 aa, Artificial Sequence
  Description of Artificial Sequence: Synthetic epitope
QLTKAMMRKA

SEQ ID NO: 37442 - protein, 10 aa, Artificial Sequence
  Description of Artificial Sequence: Synthetic epitope
QLTMTMNQTE

SEQ ID NO: 37443 - protein, 10 aa, Artificial Sequence
  Description of Artificial Sequence: Synthetic epitope
QLTQLERTRQ

SEQ ID NO: 37444 - protein, 10 aa, Artificial Sequence
  Description of Artificial Sequence: Synthetic epitope
QLTQSASEQG

SEQ ID NO: 37445 - protein, 10 aa, Artificial Sequence
  Description of Artificial Sequence: Synthetic epitope
QLTRHEIEMT

SEQ ID NO: 37446 - protein, 10 aa, Artificial Sequence
  Description of Artificial Sequence: Synthetic epitope
QLTRSELEAA

SEQ ID NO: 37447 - protein, 10 aa, Artificial Sequence
  Description of Artificial Sequence: Synthetic epitope
QLTRTVKMRF

SEQ ID NO: 37448 - protein, 10 aa, Artificial Sequence
  Description of Artificial Sequence: Synthetic epitope
QLTSESYYKE

SEQ ID NO: 37449 - protein, 10 aa, Artificial Sequence
  Description of Artificial Sequence: Synthetic epitope
QLTSLLVNGV

SEQ ID NO: 37450 - protein, 10 aa, Artificial Sequence
  Description of Artificial Sequence: Synthetic epitope
QLTSNRQHAR

SEQ ID NO: 37451 - protein, 10 aa, Artificial Sequence
  Description of Artificial Sequence: Synthetic epitope
QLTSQNEVLR

SEQ ID NO: 37452 - protein, 10 aa, Artificial Sequence
  Description of Artificial Sequence: Synthetic epitope
QLTTVGKFEE

SEQ ID NO: 37453 - protein, 10 aa, Artificial Sequence
  Description of Artificial Sequence: Synthetic epitope
QLTVSGSRSD

SEQ ID NO: 37454 - protein, 10 aa, Artificial Sequence
  Description of Artificial Sequence: Synthetic epitope
QLVAKPMQAL

SEQ ID NO: 37455 - protein, 10 aa, Artificial Sequence
  Description of Artificial Sequence: Synthetic epitope
QLVAQATATR

SEQ ID NO: 37456 - protein, 10 aa, Artificial Sequence
  Description of Artificial Sequence: Synthetic epitope
QLVARKVAAL

SEQ ID NO: 37457 - protein, 10 aa, Artificial Sequence
  Description of Artificial Sequence: Synthetic epitope
QLVEARGRYE

SEQ ID NO: 37458 - protein, 10 aa, Artificial Sequence
  Description of Artificial Sequence: Synthetic epitope
QLVGSLFQEA

SEQ ID NO: 37459 - protein, 10 aa, Artificial Sequence
  Description of Artificial Sequence: Synthetic epitope
QLVKILLVDE

SEQ ID NO: 37460 - protein, 10 aa, Artificial Sequence
  Description of Artificial Sequence: Synthetic epitope
QLVKMLLYTE

SEQ ID NO: 37461 - protein, 10 aa, Artificial Sequence
  Description of Artificial Sequence: Synthetic epitope
QLVKMLLYTE

SEQ ID NO: 37462 - protein, 10 aa, Artificial Sequence
  Description of Artificial Sequence: Synthetic epitope
QLVKTIKTLP

SEQ ID NO: 37463 - protein, 10 aa, Artificial Sequence
  Description of Artificial Sequence: Synthetic epitope
QLVKVPISLS

SEQ ID NO: 37464 - protein, 10 aa, Artificial Sequence
  Description of Artificial Sequence: Synthetic epitope
QLVLDKKQEE

SEQ ID NO: 37465 - protein, 10 aa, Artificial Sequence
  Description of Artificial Sequence: Synthetic epitope
QLVMNRATVL

SEQ ID NO: 37466 - protein, 10 aa, Artificial Sequence
  Description of Artificial Sequence: Synthetic epitope
QLVNTSSVQL

SEQ ID NO: 37467 - protein, 10 aa, Artificial Sequence
  Description of Artificial Sequence: Synthetic epitope
QLVNTVKLHY

SEQ ID NO: 37468 - protein, 10 aa, Artificial Sequence
  Description of Artificial Sequence: Synthetic epitope
QLVQKAHELM

SEQ ID NO: 37469 - protein, 10 aa, Artificial Sequence
  Description of Artificial Sequence: Synthetic epitope
QLVRVLVSPT

SEQ ID NO: 37470 - protein, 10 aa, Artificial Sequence
  Description of Artificial Sequence: Synthetic epitope
QLVSAINLST

SEQ ID NO: 37471 - protein, 10 aa, Artificial Sequence
  Description of Artificial Sequence: Synthetic epitope
QLVSERVAKL

SEQ ID NO: 37472 - protein, 10 aa, Artificial Sequence
  Description of Artificial Sequence: Synthetic epitope
QLVSSRQLPQ

SEQ ID NO: 37473 - protein, 10 aa, Artificial Sequence
  Description of Artificial Sequence: Synthetic epitope
QLWAFDAVKG

SEQ ID NO: 37474 - protein, 10 aa, Artificial Sequence
  Description of Artificial Sequence: Synthetic epitope
QLWQRTVPLD

SEQ ID NO: 37475 - protein, 10 aa, Artificial Sequence
  Description of Artificial Sequence: Synthetic epitope
QLWSQIIWGN

SEQ ID NO: 37476 - protein, 10 aa, Artificial Sequence
  Description of Artificial Sequence: Synthetic epitope
QLYEMVSLRK

SEQ ID NO: 37477 - protein, 10 aa, Artificial Sequence
  Description of Artificial Sequence: Synthetic epitope
QLYKDLVVSQ

SEQ ID NO: 37478 - protein, 10 aa, Artificial Sequence
  Description of Artificial Sequence: Synthetic epitope
QLYKQRASRL

SEQ ID NO: 37479 - protein, 10 aa, Artificial Sequence
  Description of Artificial Sequence: Synthetic epitope
QLYNLSISRI

SEQ ID NO: 37480 - protein, 10 aa, Artificial Sequence
  Description of Artificial Sequence: Synthetic epitope
QLYNVSVGNH

SEQ ID NO: 37481 - protein, 10 aa, Artificial Sequence
  Description of Artificial Sequence: Synthetic epitope
QLYSAAFSKQ

SEQ ID NO: 37482 - protein, 10 aa, Artificial Sequence
  Description of Artificial Sequence: Synthetic epitope
QLYSQKQETS

SEQ ID NO: 37483 - protein, 10 aa, Artificial Sequence
  Description of Artificial Sequence: Synthetic epitope
QMAGVVQLVK

SEQ ID NO: 37484 - protein, 10 aa, Artificial Sequence
  Description of Artificial Sequence: Synthetic epitope
QMAKIRSPGK

SEQ ID NO: 37485 - protein, 10 aa, Artificial Sequence
  Description of Artificial Sequence: Synthetic epitope
QMALEEVSVS

SEQ ID NO: 37486 - protein, 10 aa, Artificial Sequence
  Description of Artificial Sequence: Synthetic epitope
QMALQVVNIQ

SEQ ID NO: 37487 - protein, 10 aa, Artificial Sequence
  Description of Artificial Sequence: Synthetic epitope
QMAQLEKMSE

SEQ ID NO: 37488 - protein, 10 aa, Artificial Sequence
  Description of Artificial Sequence: Synthetic epitope
QMARSQQRDV

SEQ ID NO: 37489 - protein, 10 aa, Artificial Sequence
  Description of Artificial Sequence: Synthetic epitope
QMASSTDQTE

SEQ ID NO: 37490 - protein, 10 aa, Artificial Sequence
  Description of Artificial Sequence: Synthetic epitope
QMAVLSFEKD

SEQ ID NO: 37491 - protein, 10 aa, Artificial Sequence
  Description of Artificial Sequence: Synthetic epitope
QMDMNQWSAS

SEQ ID NO: 37492 - protein, 10 aa, Artificial Sequence
  Description of Artificial Sequence: Synthetic epitope
QMEPDQVYEG

SEQ ID NO: 37493 - protein, 10 aa, Artificial Sequence
  Description of Artificial Sequence: Synthetic epitope
QMEQLPSVQE

SEQ ID NO: 37494 - protein, 10 aa, Artificial Sequence
  Description of Artificial Sequence: Synthetic epitope
QMERQMAAIQ

SEQ ID NO: 37495 - protein, 10 aa, Artificial Sequence
  Description of Artificial Sequence: Synthetic epitope
QMETVRSDNI

SEQ ID NO: 37496 - protein, 10 aa, Artificial Sequence
  Description of Artificial Sequence: Synthetic epitope
QMEVEEQPPE

SEQ ID NO: 37497 - protein, 10 aa, Artificial Sequence
  Description of Artificial Sequence: Synthetic epitope
QMEVIFGKVK

SEQ ID NO: 37498 - protein, 10 aa, Artificial Sequence
  Description of Artificial Sequence: Synthetic epitope
QMEYSDELEA

SEQ ID NO: 37499 - protein, 10 aa, Artificial Sequence
  Description of Artificial Sequence: Synthetic epitope
QMFAQMYQKT

SEQ ID NO: 37500 - protein, 10 aa, Artificial Sequence
  Description of Artificial Sequence: Synthetic epitope
QMFEPQKLMI

SEQ ID NO: 37501 - protein, 10 aa, Artificial Sequence
  Description of Artificial Sequence: Synthetic epitope
QMFPLVAEHV

SEQ ID NO: 37502 - protein, 10 aa, Artificial Sequence
  Description of Artificial Sequence: Synthetic epitope
QMGAAVEAKD

SEQ ID NO: 37503 - protein, 10 aa, Artificial Sequence
  Description of Artificial Sequence: Synthetic epitope
QMGTDSQNQI

SEQ ID NO: 37504 - protein, 10 aa, Artificial Sequence
  Description of Artificial Sequence: Synthetic epitope
QMHLDRQQFL

SEQ ID NO: 37505 - protein, 10 aa, Artificial Sequence
  Description of Artificial Sequence: Synthetic epitope
QMHRAKLQKS

SEQ ID NO: 37506 - protein, 10 aa, Artificial Sequence
  Description of Artificial Sequence: Synthetic epitope
QMIAVADENQ

SEQ ID NO: 37507 - protein, 10 aa, Artificial Sequence
  Description of Artificial Sequence: Synthetic epitope
QMIDESQSLS

SEQ ID NO: 37508 - protein, 10 aa, Artificial Sequence
  Description of Artificial Sequence: Synthetic epitope
QMIPAVTATA

SEQ ID NO: 37509 - protein, 10 aa, Artificial Sequence
  Description of Artificial Sequence: Synthetic epitope
QMIRRSQEVQ

SEQ ID NO: 37510 - protein, 10 aa, Artificial Sequence
  Description of Artificial Sequence: Synthetic epitope
QMITSAPSSA

SEQ ID NO: 37511 - protein, 10 aa, Artificial Sequence
  Description of Artificial Sequence: Synthetic epitope
QMIYSAARAI

SEQ ID NO: 37512 - protein, 10 aa, Artificial Sequence
  Description of Artificial Sequence: Synthetic epitope
QMKAKQLSAQ

SEQ ID NO: 37513 - protein, 10 aa, Artificial Sequence
  Description of Artificial Sequence: Synthetic epitope
QMKEGKQEQQ

SEQ ID NO: 37514 - protein, 10 aa, Artificial Sequence
  Description of Artificial Sequence: Synthetic epitope
QMKGDTLIGQ

SEQ ID NO: 37515 - protein, 10 aa, Artificial Sequence
  Description of Artificial Sequence: Synthetic epitope
QMKGSQTEFE

SEQ ID NO: 37516 - protein, 10 aa, Artificial Sequence
  Description of Artificial Sequence: Synthetic epitope
QMKIIRDSTP

SEQ ID NO: 37517 - protein, 10 aa, Artificial Sequence
  Description of Artificial Sequence: Synthetic epitope
QMKIIVISHN

SEQ ID NO: 37518 - protein, 10 aa, Artificial Sequence
  Description of Artificial Sequence: Synthetic epitope
QMKMSERAAS

SEQ ID NO: 37519 - protein, 10 aa, Artificial Sequence
  Description of Artificial Sequence: Synthetic epitope
QMKQQKYPTK

SEQ ID NO: 37520 - protein, 10 aa, Artificial Sequence
  Description of Artificial Sequence: Synthetic epitope
QMKRAIEQES

SEQ ID NO: 37521 - protein, 10 aa, Artificial Sequence
  Description of Artificial Sequence: Synthetic epitope
QMKRDKIKEE

SEQ ID NO: 37522 - protein, 10 aa, Artificial Sequence
  Description of Artificial Sequence: Synthetic epitope
QMKTVTVSLE

SEQ ID NO: 37523 - protein, 10 aa, Artificial Sequence
  Description of Artificial Sequence: Synthetic epitope
QMLADPRSFD

SEQ ID NO: 37524 - protein, 10 aa, Artificial Sequence
  Description of Artificial Sequence: Synthetic epitope
QMLAKSQYDA

SEQ ID NO: 37525 - protein, 10 aa, Artificial Sequence
  Description of Artificial Sequence: Synthetic epitope
QMLALSEQKR

SEQ ID NO: 37526 - protein, 10 aa, Artificial Sequence
  Description of Artificial Sequence: Synthetic epitope
QMLAQKNSIN

SEQ ID NO: 37527 - protein, 10 aa, Artificial Sequence
  Description of Artificial Sequence: Synthetic epitope
QMLEAQEEHL

SEQ ID NO: 37528 - protein, 10 aa, Artificial Sequence
  Description of Artificial Sequence: Synthetic epitope
QMLEKSLRKS

SEQ ID NO: 37529 - protein, 10 aa, Artificial Sequence
  Description of Artificial Sequence: Synthetic epitope
QMLKMKEAKK

SEQ ID NO: 37530 - protein, 10 aa, Artificial Sequence
  Description of Artificial Sequence: Synthetic epitope
QMLKQVAVPQ

SEQ ID NO: 37531 - protein, 10 aa, Artificial Sequence
  Description of Artificial Sequence: Synthetic epitope
QMLKRVPELP

SEQ ID NO: 37532 - protein, 10 aa, Artificial Sequence
  Description of Artificial Sequence: Synthetic epitope
QMLKSSAPAQ

SEQ ID NO: 37533 - protein, 10 aa, Artificial Sequence
  Description of Artificial Sequence: Synthetic epitope
QMLLKSLIKD

SEQ ID NO: 37534 - protein, 10 aa, Artificial Sequence
  Description of Artificial Sequence: Synthetic epitope
QMLQAPTLVQ

SEQ ID NO: 37535 - protein, 10 aa, Artificial Sequence
  Description of Artificial Sequence: Synthetic epitope
QMLQDNNMDN

SEQ ID NO: 37536 - protein, 10 aa, Artificial Sequence
  Description of Artificial Sequence: Synthetic epitope
QMLQGSSWRE

SEQ ID NO: 37537 - protein, 10 aa, Artificial Sequence
  Description of Artificial Sequence: Synthetic epitope
QMLSQLKLVQ

SEQ ID NO: 37538 - protein, 10 aa, Artificial Sequence
  Description of Artificial Sequence: Synthetic epitope
QMLVKQDEEI

SEQ ID NO: 37539 - protein, 10 aa, Artificial Sequence
  Description of Artificial Sequence: Synthetic epitope
QMLVLKSTQR

SEQ ID NO: 37540 - protein, 10 aa, Artificial Sequence
  Description of Artificial Sequence: Synthetic epitope
QMMGSLKLLP

SEQ ID NO: 37541 - protein, 10 aa, Artificial Sequence
  Description of Artificial Sequence: Synthetic epitope
QMMRSEINTE

SEQ ID NO: 37542 - protein, 10 aa, Artificial Sequence
  Description of Artificial Sequence: Synthetic epitope
QMMSSVGRAG

SEQ ID NO: 37543 - protein, 10 aa, Artificial Sequence
  Description of Artificial Sequence: Synthetic epitope
QMMVSQIPPN

SEQ ID NO: 37544 - protein, 10 aa, Artificial Sequence
  Description of Artificial Sequence: Synthetic epitope
QMNAIPAAQV

SEQ ID NO: 37545 - protein, 10 aa, Artificial Sequence
  Description of Artificial Sequence: Synthetic epitope
QMNDLAAKTV

SEQ ID NO: 37546 - protein, 10 aa, Artificial Sequence
  Description of Artificial Sequence: Synthetic epitope
QMNGGAAKEK

SEQ ID NO: 37547 - protein, 10 aa, Artificial Sequence
  Description of Artificial Sequence: Synthetic epitope
QMNQLKNTNT

SEQ ID NO: 37548 - protein, 10 aa, Artificial Sequence
  Description of Artificial Sequence: Synthetic epitope
QMNSGSSVSA

SEQ ID NO: 37549 - protein, 10 aa, Artificial Sequence
  Description of Artificial Sequence: Synthetic epitope
QMNTALETQN

SEQ ID NO: 37550 - protein, 10 aa, Artificial Sequence
  Description of Artificial Sequence: Synthetic epitope
QMNVLAFNRQ

SEQ ID NO: 37551 - protein, 10 aa, Artificial Sequence
  Description of Artificial Sequence: Synthetic epitope
QMPAPRTQPD

SEQ ID NO: 37552 - protein, 10 aa, Artificial Sequence
  Description of Artificial Sequence: Synthetic epitope
QMPEALQASD

SEQ ID NO: 37553 - protein, 10 aa, Artificial Sequence
  Description of Artificial Sequence: Synthetic epitope
QMPESTVTST

SEQ ID NO: 37554 - protein, 10 aa, Artificial Sequence
  Description of Artificial Sequence: Synthetic epitope
QMPLKRFSME

SEQ ID NO: 37555 - protein, 10 aa, Artificial Sequence
  Description of Artificial Sequence: Synthetic epitope
QMPQAAQQAG

SEQ ID NO: 37556 - protein, 10 aa, Artificial Sequence
  Description of Artificial Sequence: Synthetic epitope
QMPVPVHVEQ

SEQ ID NO: 37557 - protein, 10 aa, Artificial Sequence
  Description of Artificial Sequence: Synthetic epitope
QMQAMLLGHS

SEQ ID NO: 37558 - protein, 10 aa, Artificial Sequence
  Description of Artificial Sequence: Synthetic epitope
QMQKTEMEQE

SEQ ID NO: 37559 - protein, 10 aa, Artificial Sequence
  Description of Artificial Sequence: Synthetic epitope
QMQNQPIAGM

SEQ ID NO: 37560 - protein, 10 aa, Artificial Sequence
  Description of Artificial Sequence: Synthetic epitope
QMQSNVTGLR

SEQ ID NO: 37561 - protein, 10 aa, Artificial Sequence
  Description of Artificial Sequence: Synthetic epitope
QMQTKLLQDQ

SEQ ID NO: 37562 - protein, 10 aa, Artificial Sequence
  Description of Artificial Sequence: Synthetic epitope
QMQVEIESDE

SEQ ID NO: 37563 - protein, 10 aa, Artificial Sequence
  Description of Artificial Sequence: Synthetic epitope
QMRGMSDKSL

SEQ ID NO: 37564 - protein, 10 aa, Artificial Sequence
  Description of Artificial Sequence: Synthetic epitope
QMRLEQQKQT

SEQ ID NO: 37565 - protein, 10 aa, Artificial Sequence
  Description of Artificial Sequence: Synthetic epitope
QMRNMSEIRK

SEQ ID NO: 37566 - protein, 10 aa, Artificial Sequence
  Description of Artificial Sequence: Synthetic epitope
QMRQHDTRPE

SEQ ID NO: 37567 - protein, 10 aa, Artificial Sequence
  Description of Artificial Sequence: Synthetic epitope
QMRRDQVTDT

SEQ ID NO: 37568 - protein, 10 aa, Artificial Sequence
  Description of Artificial Sequence: Synthetic epitope
QMRRLAAEEL

SEQ ID NO: 37569 - protein, 10 aa, Artificial Sequence
  Description of Artificial Sequence: Synthetic epitope
QMRRQAEKEE

SEQ ID NO: 37570 - protein, 10 aa, Artificial Sequence
  Description of Artificial Sequence: Synthetic epitope
QMRSLASGAL

SEQ ID NO: 37571 - protein, 10 aa, Artificial Sequence
  Description of Artificial Sequence: Synthetic epitope
QMSAMQNTKL

SEQ ID NO: 37572 - protein, 10 aa, Artificial Sequence
  Description of Artificial Sequence: Synthetic epitope
QMSEQSLSSR

SEQ ID NO: 37573 - protein, 10 aa, Artificial Sequence
  Description of Artificial Sequence: Synthetic epitope
QMSERMALDA

SEQ ID NO: 37574 - protein, 10 aa, Artificial Sequence
  Description of Artificial Sequence: Synthetic epitope
QMSFKHYAMQ

SEQ ID NO: 37575 - protein, 10 aa, Artificial Sequence
  Description of Artificial Sequence: Synthetic epitope
QMSGQMLPQQ

SEQ ID NO: 37576 - protein, 10 aa, Artificial Sequence
  Description of Artificial Sequence: Synthetic epitope
QMSLQAESKA

SEQ ID NO: 37577 - protein, 10 aa, Artificial Sequence
  Description of Artificial Sequence: Synthetic epitope
QMSPKHWQIQ

SEQ ID NO: 37578 - protein, 10 aa, Artificial Sequence
  Description of Artificial Sequence: Synthetic epitope
QMSQSKRLGS

SEQ ID NO: 37579 - protein, 10 aa, Artificial Sequence
  Description of Artificial Sequence: Synthetic epitope
QMSRQSEILG

SEQ ID NO: 37580 - protein, 10 aa, Artificial Sequence
  Description of Artificial Sequence: Synthetic epitope
QMSSLVEKKD

SEQ ID NO: 37581 - protein, 10 aa, Artificial Sequence
  Description of Artificial Sequence: Synthetic epitope
QMSSPGRKEE

SEQ ID NO: 37582 - protein, 10 aa, Artificial Sequence
  Description of Artificial Sequence: Synthetic epitope
QMSTSEELDE

SEQ ID NO: 37583 - protein, 10 aa, Artificial Sequence
  Description of Artificial Sequence: Synthetic epitope
QMSVQRIVED

SEQ ID NO: 37584 - protein, 10 aa, Artificial Sequence
  Description of Artificial Sequence: Synthetic epitope
QMSVTLKYEI

SEQ ID NO: 37585 - protein, 10 aa, Artificial Sequence
  Description of Artificial Sequence: Synthetic epitope
QMTLASLSAS

SEQ ID NO: 37586 - protein, 10 aa, Artificial Sequence
  Description of Artificial Sequence: Synthetic epitope
QMTLPKTYTI

SEQ ID NO: 37587 - protein, 10 aa, Artificial Sequence
  Description of Artificial Sequence: Synthetic epitope
QMTNASNSQQ

SEQ ID NO: 37588 - protein, 10 aa, Artificial Sequence
  Description of Artificial Sequence: Synthetic epitope
QMTSTKEQVD

SEQ ID NO: 37589 - protein, 10 aa, Artificial Sequence
  Description of Artificial Sequence: Synthetic epitope
QMTTLNSTSS

SEQ ID NO: 37590 - protein, 10 aa, Artificial Sequence
  Description of Artificial Sequence: Synthetic epitope
QMVNMHMEKV

SEQ ID NO: 37591 - protein, 10 aa, Artificial Sequence
  Description of Artificial Sequence: Synthetic epitope
QMVNQALKEE

SEQ ID NO: 37592 - protein, 10 aa, Artificial Sequence
  Description of Artificial Sequence: Synthetic epitope
QMVSGPNKII

SEQ ID NO: 37593 - protein, 10 aa, Artificial Sequence
  Description of Artificial Sequence: Synthetic epitope
QNAAFLEQTL

SEQ ID NO: 37594 - protein, 10 aa, Artificial Sequence
  Description of Artificial Sequence: Synthetic epitope
QNAAKASRKK

SEQ ID NO: 37595 - protein, 10 aa, Artificial Sequence
  Description of Artificial Sequence: Synthetic epitope
QNAAKQPSDK

SEQ ID NO: 37596 - protein, 10 aa, Artificial Sequence
  Description of Artificial Sequence: Synthetic epitope
QNAATAVTNL

SEQ ID NO: 37597 - protein, 10 aa, Artificial Sequence
  Description of Artificial Sequence: Synthetic epitope
QNAEEASQIK

SEQ ID NO: 37598 - protein, 10 aa, Artificial Sequence
  Description of Artificial Sequence: Synthetic epitope
QNAEMEFEPF

SEQ ID NO: 37599 - protein, 10 aa, Artificial Sequence
  Description of Artificial Sequence: Synthetic epitope
QNAGAESVDS

SEQ ID NO: 37600 - protein, 10 aa, Artificial Sequence
  Description of Artificial Sequence: Synthetic epitope
QNAHSMALPA

SEQ ID NO: 37601 - protein, 10 aa, Artificial Sequence
  Description of Artificial Sequence: Synthetic epitope
QNAKNHQNEI

SEQ ID NO: 37602 - protein, 10 aa, Artificial Sequence
  Description of Artificial Sequence: Synthetic epitope
QNALAENDTP

SEQ ID NO: 37603 - protein, 10 aa, Artificial Sequence
  Description of Artificial Sequence: Synthetic epitope
QNALKSANDG

SEQ ID NO: 37604 - protein, 10 aa, Artificial Sequence
  Description of Artificial Sequence: Synthetic epitope
QNANKGTHTS

SEQ ID NO: 37605 - protein, 10 aa, Artificial Sequence
  Description of Artificial Sequence: Synthetic epitope
QNAQLSMQDN

SEQ ID NO: 37606 - protein, 10 aa, Artificial Sequence
  Description of Artificial Sequence: Synthetic epitope
QNAQLVNSLE

SEQ ID NO: 37607 - protein, 10 aa, Artificial Sequence
  Description of Artificial Sequence: Synthetic epitope
QNARESLEDQ

SEQ ID NO: 37608 - protein, 10 aa, Artificial Sequence
  Description of Artificial Sequence: Synthetic epitope
QNATQHIQEI

SEQ ID NO: 37609 - protein, 10 aa, Artificial Sequence
  Description of Artificial Sequence: Synthetic epitope
QNAVEAAKNQ

SEQ ID NO: 37610 - protein, 10 aa, Artificial Sequence
  Description of Artificial Sequence: Synthetic epitope
QNAVKFNLAE

SEQ ID NO: 37611 - protein, 10 aa, Artificial Sequence
  Description of Artificial Sequence: Synthetic epitope
QNAYAVASDG

SEQ ID NO: 37612 - protein, 10 aa, Artificial Sequence
  Description of Artificial Sequence: Synthetic epitope
QNAYIVSRQM

SEQ ID NO: 37613 - protein, 10 aa, Artificial Sequence
  Description of Artificial Sequence: Synthetic epitope
QNDEVAFRKF

SEQ ID NO: 37614 - protein, 10 aa, Artificial Sequence
  Description of Artificial Sequence: Synthetic epitope
QNDKAASAAR

SEQ ID NO: 37615 - protein, 10 aa, Artificial Sequence
  Description of Artificial Sequence: Synthetic epitope
QNDLTSVTEE

SEQ ID NO: 37616 - protein, 10 aa, Artificial Sequence
  Description of Artificial Sequence: Synthetic epitope
QNDMTSLEND

SEQ ID NO: 37617 - protein, 10 aa, Artificial Sequence
  Description of Artificial Sequence: Synthetic epitope
QNDSANSVEV

SEQ ID NO: 37618 - protein, 10 aa, Artificial Sequence
  Description of Artificial Sequence: Synthetic epitope
QNDSEAIDQL

SEQ ID NO: 37619 - protein, 10 aa, Artificial Sequence
  Description of Artificial Sequence: Synthetic epitope
QNDSQAIAEV

SEQ ID NO: 37620 - protein, 10 aa, Artificial Sequence
  Description of Artificial Sequence: Synthetic epitope
QNDTAFVFPR

SEQ ID NO: 37621 - protein, 10 aa, Artificial Sequence
  Description of Artificial Sequence: Synthetic epitope
QNDTKALRSK

SEQ ID NO: 37622 - protein, 10 aa, Artificial Sequence
  Description of Artificial Sequence: Synthetic epitope
QNDVEETSRI

SEQ ID NO: 37623 - protein, 10 aa, Artificial Sequence
  Description of Artificial Sequence: Synthetic epitope
QNDVFIIPDQ

SEQ ID NO: 37624 - protein, 10 aa, Artificial Sequence
  Description of Artificial Sequence: Synthetic epitope
QNEAIEQVRA

SEQ ID NO: 37625 - protein, 10 aa, Artificial Sequence
  Description of Artificial Sequence: Synthetic epitope
QNEAIEQVRA

SEQ ID NO: 37626 - protein, 10 aa, Artificial Sequence
  Description of Artificial Sequence: Synthetic epitope
QNEAIEQVRA

SEQ ID NO: 37627 - protein, 10 aa, Artificial Sequence
  Description of Artificial Sequence: Synthetic epitope
QNEAIEQVRA

SEQ ID NO: 37628 - protein, 10 aa, Artificial Sequence
  Description of Artificial Sequence: Synthetic epitope
QNEAIEQVRA

SEQ ID NO: 37629 - protein, 10 aa, Artificial Sequence
  Description of Artificial Sequence: Synthetic epitope
QNEARTETLN

SEQ ID NO: 37630 - protein, 10 aa, Artificial Sequence
  Description of Artificial Sequence: Synthetic epitope
QNEDKIISNV

SEQ ID NO: 37631 - protein, 10 aa, Artificial Sequence
  Description of Artificial Sequence: Synthetic epitope
QNEGQASSVA

SEQ ID NO: 37632 - protein, 10 aa, Artificial Sequence
  Description of Artificial Sequence: Synthetic epitope
QNEKATSAQP

SEQ ID NO: 37633 - protein, 10 aa, Artificial Sequence
  Description of Artificial Sequence: Synthetic epitope
QNEMKEQLKA

SEQ ID NO: 37634 - protein, 10 aa, Artificial Sequence
  Description of Artificial Sequence: Synthetic epitope
QNEQAKEMQQ

SEQ ID NO: 37635 - protein, 10 aa, Artificial Sequence
  Description of Artificial Sequence: Synthetic epitope
QNERREQAQR

SEQ ID NO: 37636 - protein, 10 aa, Artificial Sequence
  Description of Artificial Sequence: Synthetic epitope
QNETNETIHM

SEQ ID NO: 37637 - protein, 10 aa, Artificial Sequence
  Description of Artificial Sequence: Synthetic epitope
QNEVEASDLE

SEQ ID NO: 37638 - protein, 10 aa, Artificial Sequence
  Description of Artificial Sequence: Synthetic epitope
QNEVFGLFQK

SEQ ID NO: 37639 - protein, 10 aa, Artificial Sequence
  Description of Artificial Sequence: Synthetic epitope
QNEVPEVKKE

SEQ ID NO: 37640 - protein, 10 aa, Artificial Sequence
  Description of Artificial Sequence: Synthetic epitope
QNFAKSALVK

SEQ ID NO: 37641 - protein, 10 aa, Artificial Sequence
  Description of Artificial Sequence: Synthetic epitope
QNFEAESIQD

SEQ ID NO: 37642 - protein, 10 aa, Artificial Sequence
  Description of Artificial Sequence: Synthetic epitope
QNFHQSIPSF

SEQ ID NO: 37643 - protein, 10 aa, Artificial Sequence
  Description of Artificial Sequence: Synthetic epitope
QNFRKSTTQA

SEQ ID NO: 37644 - protein, 10 aa, Artificial Sequence
  Description of Artificial Sequence: Synthetic epitope
QNGASRSSKD

SEQ ID NO: 37645 - protein, 10 aa, Artificial Sequence
  Description of Artificial Sequence: Synthetic epitope
QNGASTEIQN

SEQ ID NO: 37646 - protein, 10 aa, Artificial Sequence
  Description of Artificial Sequence: Synthetic epitope
QNGDLEMIKM

SEQ ID NO: 37647 - protein, 10 aa, Artificial Sequence
  Description of Artificial Sequence: Synthetic epitope
QNGFDKLSND

SEQ ID NO: 37648 - protein, 10 aa, Artificial Sequence
  Description of Artificial Sequence: Synthetic epitope
QNGIQTNKPA

SEQ ID NO: 37649 - protein, 10 aa, Artificial Sequence
  Description of Artificial Sequence: Synthetic epitope
QNGKYMQNSN

SEQ ID NO: 37650 - protein, 10 aa, Artificial Sequence
  Description of Artificial Sequence: Synthetic epitope
QNGLEVSLSS

SEQ ID NO: 37651 - protein, 10 aa, Artificial Sequence
  Description of Artificial Sequence: Synthetic epitope
QNGMNLQTLS

SEQ ID NO: 37652 - protein, 10 aa, Artificial Sequence
  Description of Artificial Sequence: Synthetic epitope
QNGQDKTNAP

SEQ ID NO: 37653 - protein, 10 aa, Artificial Sequence
  Description of Artificial Sequence: Synthetic epitope
QNGQTTVEGS

SEQ ID NO: 37654 - protein, 10 aa, Artificial Sequence
  Description of Artificial Sequence: Synthetic epitope
QNGRKSTEFP

SEQ ID NO: 37655 - protein, 10 aa, Artificial Sequence
  Description of Artificial Sequence: Synthetic epitope
QNGSLSQSSV

SEQ ID NO: 37656 - protein, 10 aa, Artificial Sequence
  Description of Artificial Sequence: Synthetic epitope
QNGTNTEATP

SEQ ID NO: 37657 - protein, 10 aa, Artificial Sequence
  Description of Artificial Sequence: Synthetic epitope
QNGWLPISAM

SEQ ID NO: 37658 - protein, 10 aa, Artificial Sequence
  Description of Artificial Sequence: Synthetic epitope
QNHDAADKAA

SEQ ID NO: 37659 - protein, 10 aa, Artificial Sequence
  Description of Artificial Sequence: Synthetic epitope
QNHEIELTKV

SEQ ID NO: 37660 - protein, 10 aa, Artificial Sequence
  Description of Artificial Sequence: Synthetic epitope
QNHQPKSPAH

SEQ ID NO: 37661 - protein, 10 aa, Artificial Sequence
  Description of Artificial Sequence: Synthetic epitope
QNHSANAVRP

SEQ ID NO: 37662 - protein, 10 aa, Artificial Sequence
  Description of Artificial Sequence: Synthetic epitope
QNHSLMTKFE

SEQ ID NO: 37663 - protein, 10 aa, Artificial Sequence
  Description of Artificial Sequence: Synthetic epitope
QNHSTRSVSA

SEQ ID NO: 37664 - protein, 10 aa, Artificial Sequence
  Description of Artificial Sequence: Synthetic epitope
QNIAEASSYA

SEQ ID NO: 37665 - protein, 10 aa, Artificial Sequence
  Description of Artificial Sequence: Synthetic epitope
QNIDRVKALI

SEQ ID NO: 37666 - protein, 10 aa, Artificial Sequence
  Description of Artificial Sequence: Synthetic epitope
QNIDRVKALI

SEQ ID NO: 37667 - protein, 10 aa, Artificial Sequence
  Description of Artificial Sequence: Synthetic epitope
QNIENALKGK

SEQ ID NO: 37668 - protein, 10 aa, Artificial Sequence
  Description of Artificial Sequence: Synthetic epitope
QNIERLNGQG

SEQ ID NO: 37669 - protein, 10 aa, Artificial Sequence
  Description of Artificial Sequence: Synthetic epitope
QNIESTIVEL

SEQ ID NO: 37670 - protein, 10 aa, Artificial Sequence
  Description of Artificial Sequence: Synthetic epitope
QNIGIDKIKR

SEQ ID NO: 37671 - protein, 10 aa, Artificial Sequence
  Description of Artificial Sequence: Synthetic epitope
QNIPSQDEKR

SEQ ID NO: 37672 - protein, 10 aa, Artificial Sequence
  Description of Artificial Sequence: Synthetic epitope
QNIQSKKRKN

SEQ ID NO: 37673 - protein, 10 aa, Artificial Sequence
  Description of Artificial Sequence: Synthetic epitope
QNIQVAEEHY

SEQ ID NO: 37674 - protein, 10 aa, Artificial Sequence
  Description of Artificial Sequence: Synthetic epitope
QNIRNTIEET

SEQ ID NO: 37675 - protein, 10 aa, Artificial Sequence
  Description of Artificial Sequence: Synthetic epitope
QNISKAFAFL

SEQ ID NO: 37676 - protein, 10 aa, Artificial Sequence
  Description of Artificial Sequence: Synthetic epitope
QNISSQIYQL

SEQ ID NO: 37677 - protein, 10 aa, Artificial Sequence
  Description of Artificial Sequence: Synthetic epitope
QNITFQTESS

SEQ ID NO: 37678 - protein, 10 aa, Artificial Sequence
  Description of Artificial Sequence: Synthetic epitope
QNKAIIARVT

SEQ ID NO: 37679 - protein, 10 aa, Artificial Sequence
  Description of Artificial Sequence: Synthetic epitope
QNKASTSSPE

SEQ ID NO: 37680 - protein, 10 aa, Artificial Sequence
  Description of Artificial Sequence: Synthetic epitope
QNKESLTDKV

SEQ ID NO: 37681 - protein, 10 aa, Artificial Sequence
  Description of Artificial Sequence: Synthetic epitope
QNKHAGSNGN

SEQ ID NO: 37682 - protein, 10 aa, Artificial Sequence
  Description of Artificial Sequence: Synthetic epitope
QNKIAESIPY

SEQ ID NO: 37683 - protein, 10 aa, Artificial Sequence
  Description of Artificial Sequence: Synthetic epitope
QNKKLKVAEA

SEQ ID NO: 37684 - protein, 10 aa, Artificial Sequence
  Description of Artificial Sequence: Synthetic epitope
QNKKSDNKSE

SEQ ID NO: 37685 - protein, 10 aa, Artificial Sequence
  Description of Artificial Sequence: Synthetic epitope
QNKKSDVYGN

SEQ ID NO: 37686 - protein, 10 aa, Artificial Sequence
  Description of Artificial Sequence: Synthetic epitope
QNKKTSSQLS

SEQ ID NO: 37687 - protein, 10 aa, Artificial Sequence
  Description of Artificial Sequence: Synthetic epitope
QNKKTSSQLS

SEQ ID NO: 37688 - protein, 10 aa, Artificial Sequence
  Description of Artificial Sequence: Synthetic epitope
QNKLVIKTET

SEQ ID NO: 37689 - protein, 10 aa, Artificial Sequence
  Description of Artificial Sequence: Synthetic epitope
QNKNTESIIE

SEQ ID NO: 37690 - protein, 10 aa, Artificial Sequence
  Description of Artificial Sequence: Synthetic epitope
QNKQDSENTE

SEQ ID NO: 37691 - protein, 10 aa, Artificial Sequence
  Description of Artificial Sequence: Synthetic epitope
QNKQKEQREL

SEQ ID NO: 37692 - protein, 10 aa, Artificial Sequence
  Description of Artificial Sequence: Synthetic epitope
QNKQLKPKQP

SEQ ID NO: 37693 - protein, 10 aa, Artificial Sequence
  Description of Artificial Sequence: Synthetic epitope
QNKSTNVTVA

SEQ ID NO: 37694 - protein, 10 aa, Artificial Sequence
  Description of Artificial Sequence: Synthetic epitope
QNKWLIEKEG

SEQ ID NO: 37695 - protein, 10 aa, Artificial Sequence
  Description of Artificial Sequence: Synthetic epitope
QNKYIMKEPV

SEQ ID NO: 37696 - protein, 10 aa, Artificial Sequence
  Description of Artificial Sequence: Synthetic epitope
QNLAFEKTVK

SEQ ID NO: 37697 - protein, 10 aa, Artificial Sequence
  Description of Artificial Sequence: Synthetic epitope
QNLANEEVRK

SEQ ID NO: 37698 - protein, 10 aa, Artificial Sequence
  Description of Artificial Sequence: Synthetic epitope
QNLASNQQKS

SEQ ID NO: 37699 - protein, 10 aa, Artificial Sequence
  Description of Artificial Sequence: Synthetic epitope
QNLEALLVAN

SEQ ID NO: 37700 - protein, 10 aa, Artificial Sequence
  Description of Artificial Sequence: Synthetic epitope
QNLEEKTSYS

SEQ ID NO: 37701 - protein, 10 aa, Artificial Sequence
  Description of Artificial Sequence: Synthetic epitope
QNLHVSSKVK

SEQ ID NO: 37702 - protein, 10 aa, Artificial Sequence
  Description of Artificial Sequence: Synthetic epitope
QNLILSAQQE

SEQ ID NO: 37703 - protein, 10 aa, Artificial Sequence
  Description of Artificial Sequence: Synthetic epitope
QNLKEQNQTE

SEQ ID NO: 37704 - protein, 10 aa, Artificial Sequence
  Description of Artificial Sequence: Synthetic epitope
QNLLSLVKSD

SEQ ID NO: 37705 - protein, 10 aa, Artificial Sequence
  Description of Artificial Sequence: Synthetic epitope
QNLNQESSFL

SEQ ID NO: 37706 - protein, 10 aa, Artificial Sequence
  Description of Artificial Sequence: Synthetic epitope
QNLNWRSHNN

SEQ ID NO: 37707 - protein, 10 aa, Artificial Sequence
  Description of Artificial Sequence: Synthetic epitope
QNLPANTQQA

SEQ ID NO: 37708 - protein, 10 aa, Artificial Sequence
  Description of Artificial Sequence: Synthetic epitope
QNLQKVNTIR

SEQ ID NO: 37709 - protein, 10 aa, Artificial Sequence
  Description of Artificial Sequence: Synthetic epitope
QNLQPANIQQ

SEQ ID NO: 37710 - protein, 10 aa, Artificial Sequence
  Description of Artificial Sequence: Synthetic epitope
QNLQSSERSE

SEQ ID NO: 37711 - protein, 10 aa, Artificial Sequence
  Description of Artificial Sequence: Synthetic epitope
QNLRFPVDLS

SEQ ID NO: 37712 - protein, 10 aa, Artificial Sequence
  Description of Artificial Sequence: Synthetic epitope
QNLRIEDDMD

SEQ ID NO: 37713 - protein, 10 aa, Artificial Sequence
  Description of Artificial Sequence: Synthetic epitope
QNLSIMIQDL

SEQ ID NO: 37714 - protein, 10 aa, Artificial Sequence
  Description of Artificial Sequence: Synthetic epitope
QNLSQKADNF

SEQ ID NO: 37715 - protein, 10 aa, Artificial Sequence
  Description of Artificial Sequence: Synthetic epitope
QNLSRTFKSL

SEQ ID NO: 37716 - protein, 10 aa, Artificial Sequence
  Description of Artificial Sequence: Synthetic epitope
QNLTLQEITF

SEQ ID NO: 37717 - protein, 10 aa, Artificial Sequence
  Description of Artificial Sequence: Synthetic epitope
QNLTTLATNN

SEQ ID NO: 37718 - protein, 10 aa, Artificial Sequence
  Description of Artificial Sequence: Synthetic epitope
QNLTVKLQLQ

SEQ ID NO: 37719 - protein, 10 aa, Artificial Sequence
  Description of Artificial Sequence: Synthetic epitope
QNLVARASKY

SEQ ID NO: 37720 - protein, 10 aa, Artificial Sequence
  Description of Artificial Sequence: Synthetic epitope
QNLVKIMSLY

SEQ ID NO: 37721 - protein, 10 aa, Artificial Sequence
  Description of Artificial Sequence: Synthetic epitope
QNMAFQDHPE

SEQ ID NO: 37722 - protein, 10 aa, Artificial Sequence
  Description of Artificial Sequence: Synthetic epitope
QNMAKPKQAA

SEQ ID NO: 37723 - protein, 10 aa, Artificial Sequence
  Description of Artificial Sequence: Synthetic epitope
QNMALILLKE

SEQ ID NO: 37724 - protein, 10 aa, Artificial Sequence
  Description of Artificial Sequence: Synthetic epitope
QNMHEPFPMS

SEQ ID NO: 37725 - protein, 10 aa, Artificial Sequence
  Description of Artificial Sequence: Synthetic epitope
QNMHLLTLKQ

SEQ ID NO: 37726 - protein, 10 aa, Artificial Sequence
  Description of Artificial Sequence: Synthetic epitope
QNMMFEGKEK

SEQ ID NO: 37727 - protein, 10 aa, Artificial Sequence
  Description of Artificial Sequence: Synthetic epitope
QNMNNAGDKW

SEQ ID NO: 37728 - protein, 10 aa, Artificial Sequence
  Description of Artificial Sequence: Synthetic epitope
QNMPETLPNN

SEQ ID NO: 37729 - protein, 10 aa, Artificial Sequence
  Description of Artificial Sequence: Synthetic epitope
QNNEHRIAQY

SEQ ID NO: 37730 - protein, 10 aa, Artificial Sequence
  Description of Artificial Sequence: Synthetic epitope
QNNEIEKMNL

SEQ ID NO: 37731 - protein, 10 aa, Artificial Sequence
  Description of Artificial Sequence: Synthetic epitope
QNNESEDSEE

SEQ ID NO: 37732 - protein, 10 aa, Artificial Sequence
  Description of Artificial Sequence: Synthetic epitope
QNNIFIDDIS

SEQ ID NO: 37733 - protein, 10 aa, Artificial Sequence
  Description of Artificial Sequence: Synthetic epitope
QNNINKVDSK

SEQ ID NO: 37734 - protein, 10 aa, Artificial Sequence
  Description of Artificial Sequence: Synthetic epitope
QNNISTMSAE

SEQ ID NO: 37735 - protein, 10 aa, Artificial Sequence
  Description of Artificial Sequence: Synthetic epitope
QNNQENSSHQ

SEQ ID NO: 37736 - protein, 10 aa, Artificial Sequence
  Description of Artificial Sequence: Synthetic epitope
QNNQKKVLAK

SEQ ID NO: 37737 - protein, 10 aa, Artificial Sequence
  Description of Artificial Sequence: Synthetic epitope
QNNRDAMELK

SEQ ID NO: 37738 - protein, 10 aa, Artificial Sequence
  Description of Artificial Sequence: Synthetic epitope
QNNRIRFSKL

SEQ ID NO: 37739 - protein, 10 aa, Artificial Sequence
  Description of Artificial Sequence: Synthetic epitope
QNNSTASTMG

SEQ ID NO: 37740 - protein, 10 aa, Artificial Sequence
  Description of Artificial Sequence: Synthetic epitope
QNNTAKLVKQ

SEQ ID NO: 37741 - protein, 10 aa, Artificial Sequence
  Description of Artificial Sequence: Synthetic epitope
QNNTKDSTRL

SEQ ID NO: 37742 - protein, 10 aa, Artificial Sequence
  Description of Artificial Sequence: Synthetic epitope
QNNTNANKPK

SEQ ID NO: 37743 - protein, 10 aa, Artificial Sequence
  Description of Artificial Sequence: Synthetic epitope
QNNVRAVPQP

SEQ ID NO: 37744 - protein, 10 aa, Artificial Sequence
  Description of Artificial Sequence: Synthetic epitope
QNNYEKSQET

SEQ ID NO: 37745 - protein, 10 aa, Artificial Sequence
  Description of Artificial Sequence: Synthetic epitope
QNPANMSKYQ

SEQ ID NO: 37746 - protein, 10 aa, Artificial Sequence
  Description of Artificial Sequence: Synthetic epitope
QNPANMSKYQ

SEQ ID NO: 37747 - protein, 10 aa, Artificial Sequence
  Description of Artificial Sequence: Synthetic epitope
QNPDITSSRY

SEQ ID NO: 37748 - protein, 10 aa, Artificial Sequence
  Description of Artificial Sequence: Synthetic epitope
QNPDSLHRES

SEQ ID NO: 37749 - protein, 10 aa, Artificial Sequence
  Description of Artificial Sequence: Synthetic epitope
QNPLLANEET

SEQ ID NO: 37750 - protein, 10 aa, Artificial Sequence
  Description of Artificial Sequence: Synthetic epitope
QNPQSERARY

SEQ ID NO: 37751 - protein, 10 aa, Artificial Sequence
  Description of Artificial Sequence: Synthetic epitope
QNPQSERARY

SEQ ID NO: 37752 - protein, 10 aa, Artificial Sequence
  Description of Artificial Sequence: Synthetic epitope
QNPTMINKGT

SEQ ID NO: 37753 - protein, 10 aa, Artificial Sequence
  Description of Artificial Sequence: Synthetic epitope
QNPTSLKISE

SEQ ID NO: 37754 - protein, 10 aa, Artificial Sequence
  Description of Artificial Sequence: Synthetic epitope
QNQAKTKAAV

SEQ ID NO: 37755 - protein, 10 aa, Artificial Sequence
  Description of Artificial Sequence: Synthetic epitope
QNQALRLRAR

SEQ ID NO: 37756 - protein, 10 aa, Artificial Sequence
  Description of Artificial Sequence: Synthetic epitope
QNQATQVELD

SEQ ID NO: 37757 - protein, 10 aa, Artificial Sequence
  Description of Artificial Sequence: Synthetic epitope
QNQENAKLEQ

SEQ ID NO: 37758 - protein, 10 aa, Artificial Sequence
  Description of Artificial Sequence: Synthetic epitope
QNQESAVSQQ

SEQ ID NO: 37759 - protein, 10 aa, Artificial Sequence
  Description of Artificial Sequence: Synthetic epitope
QNQISRQNKL

SEQ ID NO: 37760 - protein, 10 aa, Artificial Sequence
  Description of Artificial Sequence: Synthetic epitope
QNQKSSAPVH

SEQ ID NO: 37761 - protein, 10 aa, Artificial Sequence
  Description of Artificial Sequence: Synthetic epitope
QNQLVDREHK

SEQ ID NO: 37762 - protein, 10 aa, Artificial Sequence
  Description of Artificial Sequence: Synthetic epitope
QNQNSKIASS

SEQ ID NO: 37763 - protein, 10 aa, Artificial Sequence
  Description of Artificial Sequence: Synthetic epitope
QNQSAADRAI

SEQ ID NO: 37764 - protein, 10 aa, Artificial Sequence
  Description of Artificial Sequence: Synthetic epitope
QNQSDSLLAL

SEQ ID NO: 37765 - protein, 10 aa, Artificial Sequence
  Description of Artificial Sequence: Synthetic epitope
QNQSQRVDEL

SEQ ID NO: 37766 - protein, 10 aa, Artificial Sequence
  Description of Artificial Sequence: Synthetic epitope
QNQSSTNHPG

SEQ ID NO: 37767 - protein, 10 aa, Artificial Sequence
  Description of Artificial Sequence: Synthetic epitope
QNQTAVMIEI

SEQ ID NO: 37768 - protein, 10 aa, Artificial Sequence
  Description of Artificial Sequence: Synthetic epitope
QNQYTKTNDV

SEQ ID NO: 37769 - protein, 10 aa, Artificial Sequence
  Description of Artificial Sequence: Synthetic epitope
QNRIDWGRSQ

SEQ ID NO: 37770 - protein, 10 aa, Artificial Sequence
  Description of Artificial Sequence: Synthetic epitope
QNRKHSEKMA

SEQ ID NO: 37771 - protein, 10 aa, Artificial Sequence
  Description of Artificial Sequence: Synthetic epitope
QNRMMAIAPN

SEQ ID NO: 37772 - protein, 10 aa, Artificial Sequence
  Description of Artificial Sequence: Synthetic epitope
QNRQAQIEVV

SEQ ID NO: 37773 - protein, 10 aa, Artificial Sequence
  Description of Artificial Sequence: Synthetic epitope
QNRSASERNS

SEQ ID NO: 37774 - protein, 10 aa, Artificial Sequence
  Description of Artificial Sequence: Synthetic epitope
QNRSSESYRP

SEQ ID NO: 37775 - protein, 10 aa, Artificial Sequence
  Description of Artificial Sequence: Synthetic epitope
QNRTLRTKSQ

SEQ ID NO: 37776 - protein, 10 aa, Artificial Sequence
  Description of Artificial Sequence: Synthetic epitope
QNSAIIATPE

SEQ ID NO: 37777 - protein, 10 aa, Artificial Sequence
  Description of Artificial Sequence: Synthetic epitope
QNSAIKQDAQ

SEQ ID NO: 37778 - protein, 10 aa, Artificial Sequence
  Description of Artificial Sequence: Synthetic epitope
QNSELSMDSV

SEQ ID NO: 37779 - protein, 10 aa, Artificial Sequence
  Description of Artificial Sequence: Synthetic epitope
QNSESLFTEP

SEQ ID NO: 37780 - protein, 10 aa, Artificial Sequence
  Description of Artificial Sequence: Synthetic epitope
QNSFRAESSQ

SEQ ID NO: 37781 - protein, 10 aa, Artificial Sequence
  Description of Artificial Sequence: Synthetic epitope
QNSFSAKLAP

SEQ ID NO: 37782 - protein, 10 aa, Artificial Sequence
  Description of Artificial Sequence: Synthetic epitope
QNSGEINVKP

SEQ ID NO: 37783 - protein, 10 aa, Artificial Sequence
  Description of Artificial Sequence: Synthetic epitope
QNSIRNSSQF

SEQ ID NO: 37784 - protein, 10 aa, Artificial Sequence
  Description of Artificial Sequence: Synthetic epitope
QNSIVSYTRS

SEQ ID NO: 37785 - protein, 10 aa, Artificial Sequence
  Description of Artificial Sequence: Synthetic epitope
QNSKETSQPT

SEQ ID NO: 37786 - protein, 10 aa, Artificial Sequence
  Description of Artificial Sequence: Synthetic epitope
QNSKFKAIDE

SEQ ID NO: 37787 - protein, 10 aa, Artificial Sequence
  Description of Artificial Sequence: Synthetic epitope
QNSKNAKDKN

SEQ ID NO: 37788 - protein, 10 aa, Artificial Sequence
  Description of Artificial Sequence: Synthetic epitope
QNSLEAQKSS

SEQ ID NO: 37789 - protein, 10 aa, Artificial Sequence
  Description of Artificial Sequence: Synthetic epitope
QNSLLEVLRL

SEQ ID NO: 37790 - protein, 10 aa, Artificial Sequence
  Description of Artificial Sequence: Synthetic epitope
QNSLNSQHSR

SEQ ID NO: 37791 - protein, 10 aa, Artificial Sequence
  Description of Artificial Sequence: Synthetic epitope
QNSLSSAHNS

SEQ ID NO: 37792 - protein, 10 aa, Artificial Sequence
  Description of Artificial Sequence: Synthetic epitope
QNSMNRLAVQ

SEQ ID NO: 37793 - protein, 10 aa, Artificial Sequence
  Description of Artificial Sequence: Synthetic epitope
QNSMQLSREE

SEQ ID NO: 37794 - protein, 10 aa, Artificial Sequence
  Description of Artificial Sequence: Synthetic epitope
QNSNVGKLKT

SEQ ID NO: 37795 - protein, 10 aa, Artificial Sequence
  Description of Artificial Sequence: Synthetic epitope
QNSPATEQTI

SEQ ID NO: 37796 - protein, 10 aa, Artificial Sequence
  Description of Artificial Sequence: Synthetic epitope
QNSPRSQKQQ

SEQ ID NO: 37797 - protein, 10 aa, Artificial Sequence
  Description of Artificial Sequence: Synthetic epitope
QNSPVNMNPP

SEQ ID NO: 37798 - protein, 10 aa, Artificial Sequence
  Description of Artificial Sequence: Synthetic epitope
QNSQIVTSRQ

SEQ ID NO: 37799 - protein, 10 aa, Artificial Sequence
  Description of Artificial Sequence: Synthetic epitope
QNSQSVSRAY

SEQ ID NO: 37800 - protein, 10 aa, Artificial Sequence
  Description of Artificial Sequence: Synthetic epitope
QNSQVSVNGG

SEQ ID NO: 37801 - protein, 10 aa, Artificial Sequence
  Description of Artificial Sequence: Synthetic epitope
QNSRYFRMSD

SEQ ID NO: 37802 - protein, 10 aa, Artificial Sequence
  Description of Artificial Sequence: Synthetic epitope
QNSRYQTYQR

SEQ ID NO: 37803 - protein, 10 aa, Artificial Sequence
  Description of Artificial Sequence: Synthetic epitope
QNSRYQTYQR

SEQ ID NO: 37804 - protein, 10 aa, Artificial Sequence
  Description of Artificial Sequence: Synthetic epitope
QNSSGETVTS

SEQ ID NO: 37805 - protein, 10 aa, Artificial Sequence
  Description of Artificial Sequence: Synthetic epitope
QNSSKKESES

SEQ ID NO: 37806 - protein, 10 aa, Artificial Sequence
  Description of Artificial Sequence: Synthetic epitope
QNSSMMKKTL

SEQ ID NO: 37807 - protein, 10 aa, Artificial Sequence
  Description of Artificial Sequence: Synthetic epitope
QNSSQKTQND

SEQ ID NO: 37808 - protein, 10 aa, Artificial Sequence
  Description of Artificial Sequence: Synthetic epitope
QNSSQLLKHN

SEQ ID NO: 37809 - protein, 10 aa, Artificial Sequence
  Description of Artificial Sequence: Synthetic epitope
QNSSRVNEQP

SEQ ID NO: 37810 - protein, 10 aa, Artificial Sequence
  Description of Artificial Sequence: Synthetic epitope
QNSTETPSAY

SEQ ID NO: 37811 - protein, 10 aa, Artificial Sequence
  Description of Artificial Sequence: Synthetic epitope
QNSTLSGKSS

SEQ ID NO: 37812 - protein, 10 aa, Artificial Sequence
  Description of Artificial Sequence: Synthetic epitope
QNSTNVQMVD

SEQ ID NO: 37813 - protein, 10 aa, Artificial Sequence
  Description of Artificial Sequence: Synthetic epitope
QNSTSLTGKP

SEQ ID NO: 37814 - protein, 10 aa, Artificial Sequence
  Description of Artificial Sequence: Synthetic epitope
QNSYVKLPPE

SEQ ID NO: 37815 - protein, 10 aa, Artificial Sequence
  Description of Artificial Sequence: Synthetic epitope
QNTANESSNA

SEQ ID NO: 37816 - protein, 10 aa, Artificial Sequence
  Description of Artificial Sequence: Synthetic epitope
QNTAYSNWNQ

SEQ ID NO: 37817 - protein, 10 aa, Artificial Sequence
  Description of Artificial Sequence: Synthetic epitope
QNTEALQSKF

SEQ ID NO: 37818 - protein, 10 aa, Artificial Sequence
  Description of Artificial Sequence: Synthetic epitope
QNTEWIDKVY

SEQ ID NO: 37819 - protein, 10 aa, Artificial Sequence
  Description of Artificial Sequence: Synthetic epitope
QNTEYEDEKT

SEQ ID NO: 37820 - protein, 10 aa, Artificial Sequence
  Description of Artificial Sequence: Synthetic epitope
QNTFAILDLK

SEQ ID NO: 37821 - protein, 10 aa, Artificial Sequence
  Description of Artificial Sequence: Synthetic epitope
QNTIFVSSPR

SEQ ID NO: 37822 - protein, 10 aa, Artificial Sequence
  Description of Artificial Sequence: Synthetic epitope
QNTKISTQLD

SEQ ID NO: 37823 - protein, 10 aa, Artificial Sequence
  Description of Artificial Sequence: Synthetic epitope
QNTKRDIPDK

SEQ ID NO: 37824 - protein, 10 aa, Artificial Sequence
  Description of Artificial Sequence: Synthetic epitope
QNTKSSRIEA

SEQ ID NO: 37825 - protein, 10 aa, Artificial Sequence
  Description of Artificial Sequence: Synthetic epitope
QNTLSKSSEV

SEQ ID NO: 37826 - protein, 10 aa, Artificial Sequence
  Description of Artificial Sequence: Synthetic epitope
QNTLTPLNER

SEQ ID NO: 37827 - protein, 10 aa, Artificial Sequence
  Description of Artificial Sequence: Synthetic epitope
QNTQSKNRAA

SEQ ID NO: 37828 - protein, 10 aa, Artificial Sequence
  Description of Artificial Sequence: Synthetic epitope
QNTSDSDRYA

SEQ ID NO: 37829 - protein, 10 aa, Artificial Sequence
  Description of Artificial Sequence: Synthetic epitope
QNTSMSSIYQ

SEQ ID NO: 37830 - protein, 10 aa, Artificial Sequence
  Description of Artificial Sequence: Synthetic epitope
QNTSQKAAGD

SEQ ID NO: 37831 - protein, 10 aa, Artificial Sequence
  Description of Artificial Sequence: Synthetic epitope
QNVDAADTKS

SEQ ID NO: 37832 - protein, 10 aa, Artificial Sequence
  Description of Artificial Sequence: Synthetic epitope
QNVDSERSEQ

SEQ ID NO: 37833 - protein, 10 aa, Artificial Sequence
  Description of Artificial Sequence: Synthetic epitope
QNVEATVLVD

SEQ ID NO: 37834 - protein, 10 aa, Artificial Sequence
  Description of Artificial Sequence: Synthetic epitope
QNVEKKGHGR

SEQ ID NO: 37835 - protein, 10 aa, Artificial Sequence
  Description of Artificial Sequence: Synthetic epitope
QNVEQVSRLA

SEQ ID NO: 37836 - protein, 10 aa, Artificial Sequence
  Description of Artificial Sequence: Synthetic epitope
QNVIKETRAE

SEQ ID NO: 37837 - protein, 10 aa, Artificial Sequence
  Description of Artificial Sequence: Synthetic epitope
QNVKLKNSQE

SEQ ID NO: 37838 - protein, 10 aa, Artificial Sequence
  Description of Artificial Sequence: Synthetic epitope
QNVNKAQVKI

SEQ ID NO: 37839 - protein, 10 aa, Artificial Sequence
  Description of Artificial Sequence: Synthetic epitope
QNVNVKSAQQ

SEQ ID NO: 37840 - protein, 10 aa, Artificial Sequence
  Description of Artificial Sequence: Synthetic epitope
QNVQSNSLRR

SEQ ID NO: 37841 - protein, 10 aa, Artificial Sequence
  Description of Artificial Sequence: Synthetic epitope
QNVSAQKDGE

SEQ ID NO: 37842 - protein, 10 aa, Artificial Sequence
  Description of Artificial Sequence: Synthetic epitope
QNVSITQGEG

SEQ ID NO: 37843 - protein, 10 aa, Artificial Sequence
  Description of Artificial Sequence: Synthetic epitope
QNVSKRPMQQ

SEQ ID NO: 37844 - protein, 10 aa, Artificial Sequence
  Description of Artificial Sequence: Synthetic epitope
QNVSMVQSEI

SEQ ID NO: 37845 - protein, 10 aa, Artificial Sequence
  Description of Artificial Sequence: Synthetic epitope
QNVTRSRSKT

SEQ ID NO: 37846 - protein, 10 aa, Artificial Sequence
  Description of Artificial Sequence: Synthetic epitope
QNVVTKVKKE

SEQ ID NO: 37847 - protein, 10 aa, Artificial Sequence
  Description of Artificial Sequence: Synthetic epitope
QNWEAMGNHF

SEQ ID NO: 37848 - protein, 10 aa, Artificial Sequence
  Description of Artificial Sequence: Synthetic epitope
QNWGMQRATN

SEQ ID NO: 37849 - protein, 10 aa, Artificial Sequence
  Description of Artificial Sequence: Synthetic epitope
QNYEKMMFKE

SEQ ID NO: 37850 - protein, 10 aa, Artificial Sequence
  Description of Artificial Sequence: Synthetic epitope
QNYGETVQGT

SEQ ID NO: 37851 - protein, 10 aa, Artificial Sequence
  Description of Artificial Sequence: Synthetic epitope
QNYLKTWDMY

SEQ ID NO: 37852 - protein, 10 aa, Artificial Sequence
  Description of Artificial Sequence: Synthetic epitope
QNYSSIHSQS

SEQ ID NO: 37853 - protein, 10 aa, Artificial Sequence
  Description of Artificial Sequence: Synthetic epitope
QNYTDKSAQN

SEQ ID NO: 37854 - protein, 10 aa, Artificial Sequence
  Description of Artificial Sequence: Synthetic epitope
QNYTQEQFWA

SEQ ID NO: 37855 - protein, 10 aa, Artificial Sequence
  Description of Artificial Sequence: Synthetic epitope
QPAFSSIDKQ

SEQ ID NO: 37856 - protein, 10 aa, Artificial Sequence
  Description of Artificial Sequence: Synthetic epitope
QPAMMVNLRA

SEQ ID NO: 37857 - protein, 10 aa, Artificial Sequence
  Description of Artificial Sequence: Synthetic epitope
QPAPSSASAY

SEQ ID NO: 37858 - protein, 10 aa, Artificial Sequence
  Description of Artificial Sequence: Synthetic epitope
QPAQLSSKEN

SEQ ID NO: 37859 - protein, 10 aa, Artificial Sequence
  Description of Artificial Sequence: Synthetic epitope
QPAQMLSVDT

SEQ ID NO: 37860 - protein, 10 aa, Artificial Sequence
  Description of Artificial Sequence: Synthetic epitope
QPAQSQQVTI

SEQ ID NO: 37861 - protein, 10 aa, Artificial Sequence
  Description of Artificial Sequence: Synthetic epitope
QPASAGISQA

SEQ ID NO: 37862 - protein, 10 aa, Artificial Sequence
  Description of Artificial Sequence: Synthetic epitope
QPASSAAPSV

SEQ ID NO: 37863 - protein, 10 aa, Artificial Sequence
  Description of Artificial Sequence: Synthetic epitope
QPATIAKVSK

SEQ ID NO: 37864 - protein, 10 aa, Artificial Sequence
  Description of Artificial Sequence: Synthetic epitope
QPAVALPTSL

SEQ ID NO: 37865 - protein, 10 aa, Artificial Sequence
  Description of Artificial Sequence: Synthetic epitope
QPDLDTILEK

SEQ ID NO: 37866 - protein, 10 aa, Artificial Sequence
  Description of Artificial Sequence: Synthetic epitope
QPDLVTIVDD

SEQ ID NO: 37867 - protein, 10 aa, Artificial Sequence
  Description of Artificial Sequence: Synthetic epitope
QPDRRQLLNA

SEQ ID NO: 37868 - protein, 10 aa, Artificial Sequence
  Description of Artificial Sequence: Synthetic epitope
QPDTTSVVKD

SEQ ID NO: 37869 - protein, 10 aa, Artificial Sequence
  Description of Artificial Sequence: Synthetic epitope
QPEADALSDT

SEQ ID NO: 37870 - protein, 10 aa, Artificial Sequence
  Description of Artificial Sequence: Synthetic epitope
QPEALSEKED

SEQ ID NO: 37871 - protein, 10 aa, Artificial Sequence
  Description of Artificial Sequence: Synthetic epitope
QPEATMEREE

SEQ ID NO: 37872 - protein, 10 aa, Artificial Sequence
  Description of Artificial Sequence: Synthetic epitope
QPEDMASLSE

SEQ ID NO: 37873 - protein, 10 aa, Artificial Sequence
  Description of Artificial Sequence: Synthetic epitope
QPEESESKTK

SEQ ID NO: 37874 - protein, 10 aa, Artificial Sequence
  Description of Artificial Sequence: Synthetic epitope
QPEKWSVAKH

SEQ ID NO: 37875 - protein, 10 aa, Artificial Sequence
  Description of Artificial Sequence: Synthetic epitope
QPELSTISED

SEQ ID NO: 37876 - protein, 10 aa, Artificial Sequence
  Description of Artificial Sequence: Synthetic epitope
QPENEKEASG

SEQ ID NO: 37877 - protein, 10 aa, Artificial Sequence
  Description of Artificial Sequence: Synthetic epitope
QPENEVAAPT

SEQ ID NO: 37878 - protein, 10 aa, Artificial Sequence
  Description of Artificial Sequence: Synthetic epitope
QPEQTNAGEV

SEQ ID NO: 37879 - protein, 10 aa, Artificial Sequence
  Description of Artificial Sequence: Synthetic epitope
QPESSFKMSF

SEQ ID NO: 37880 - protein, 10 aa, Artificial Sequence
  Description of Artificial Sequence: Synthetic epitope
QPESVVNTMR

SEQ ID NO: 37881 - protein, 10 aa, Artificial Sequence
  Description of Artificial Sequence: Synthetic epitope
QPEVKSETEP

SEQ ID NO: 37882 - protein, 10 aa, Artificial Sequence
  Description of Artificial Sequence: Synthetic epitope
QPEVQTQTTV

SEQ ID NO: 37883 - protein, 10 aa, Artificial Sequence
  Description of Artificial Sequence: Synthetic epitope
QPFAKWHYIE

SEQ ID NO: 37884 - protein, 10 aa, Artificial Sequence
  Description of Artificial Sequence: Synthetic epitope
QPFATEADVE

SEQ ID NO: 37885 - protein, 10 aa, Artificial Sequence
  Description of Artificial Sequence: Synthetic epitope
QPFFWEAQAP

SEQ ID NO: 37886 - protein, 10 aa, Artificial Sequence
  Description of Artificial Sequence: Synthetic epitope
QPFQEDQQGL

SEQ ID NO: 37887 - protein, 10 aa, Artificial Sequence
  Description of Artificial Sequence: Synthetic epitope
QPGMNSQLEQ

SEQ ID NO: 37888 - protein, 10 aa, Artificial Sequence
  Description of Artificial Sequence: Synthetic epitope
QPGMRDIFKE

SEQ ID NO: 37889 - protein, 10 aa, Artificial Sequence
  Description of Artificial Sequence: Synthetic epitope
QPGNTEAKSE

SEQ ID NO: 37890 - protein, 10 aa, Artificial Sequence
  Description of Artificial Sequence: Synthetic epitope
QPGRLSQQMV

SEQ ID NO: 37891 - protein, 10 aa, Artificial Sequence
  Description of Artificial Sequence: Synthetic epitope
QPGSMLSLAP

SEQ ID NO: 37892 - protein, 10 aa, Artificial Sequence
  Description of Artificial Sequence: Synthetic epitope
QPGVKVADRK

SEQ ID NO: 37893 - protein, 10 aa, Artificial Sequence
  Description of Artificial Sequence: Synthetic epitope
QPHDLGKVGE

SEQ ID NO: 37894 - protein, 10 aa, Artificial Sequence
  Description of Artificial Sequence: Synthetic epitope
QPHKKSSTKR

SEQ ID NO: 37895 - protein, 10 aa, Artificial Sequence
  Description of Artificial Sequence: Synthetic epitope
QPHLAPLQMD

SEQ ID NO: 37896 - protein, 10 aa, Artificial Sequence
  Description of Artificial Sequence: Synthetic epitope
QPHQREVTKI

SEQ ID NO: 37897 - protein, 10 aa, Artificial Sequence
  Description of Artificial Sequence: Synthetic epitope
QPHSSALTAP

SEQ ID NO: 37898 - protein, 10 aa, Artificial Sequence
  Description of Artificial Sequence: Synthetic epitope
QPHSTQHVEN

SEQ ID NO: 37899 - protein, 10 aa, Artificial Sequence
  Description of Artificial Sequence: Synthetic epitope
QPHVFRSEHQ

SEQ ID NO: 37900 - protein, 10 aa, Artificial Sequence
  Description of Artificial Sequence: Synthetic epitope
QPIAGLYEPA

SEQ ID NO: 37901 - protein, 10 aa, Artificial Sequence
  Description of Artificial Sequence: Synthetic epitope
QPIEVLLERE

SEQ ID NO: 37902 - protein, 10 aa, Artificial Sequence
  Description of Artificial Sequence: Synthetic epitope
QPIGKVREFW

SEQ ID NO: 37903 - protein, 10 aa, Artificial Sequence
  Description of Artificial Sequence: Synthetic epitope
QPILKLALQR

SEQ ID NO: 37904 - protein, 10 aa, Artificial Sequence
  Description of Artificial Sequence: Synthetic epitope
QPIPLIIEEK

SEQ ID NO: 37905 - protein, 10 aa, Artificial Sequence
  Description of Artificial Sequence: Synthetic epitope
QPIPLKSATA

SEQ ID NO: 37906 - protein, 10 aa, Artificial Sequence
  Description of Artificial Sequence: Synthetic epitope
QPKEEAKTET

SEQ ID NO: 37907 - protein, 10 aa, Artificial Sequence
  Description of Artificial Sequence: Synthetic epitope
QPKETLQLES

SEQ ID NO: 37908 - protein, 10 aa, Artificial Sequence
  Description of Artificial Sequence: Synthetic epitope
QPKKEMKAKS

SEQ ID NO: 37909 - protein, 10 aa, Artificial Sequence
  Description of Artificial Sequence: Synthetic epitope
QPKMLSSPED

SEQ ID NO: 37910 - protein, 10 aa, Artificial Sequence
  Description of Artificial Sequence: Synthetic epitope
QPKNEADRQA

SEQ ID NO: 37911 - protein, 10 aa, Artificial Sequence
  Description of Artificial Sequence: Synthetic epitope
QPKNKRMTIS

SEQ ID NO: 37912 - protein, 10 aa, Artificial Sequence
  Description of Artificial Sequence: Synthetic epitope
QPKPIQMGQQ

SEQ ID NO: 37913 - protein, 10 aa, Artificial Sequence
  Description of Artificial Sequence: Synthetic epitope
QPKQASEETR

SEQ ID NO: 37914 - protein, 10 aa, Artificial Sequence
  Description of Artificial Sequence: Synthetic epitope
QPKRKASMPH

SEQ ID NO: 37915 - protein, 10 aa, Artificial Sequence
  Description of Artificial Sequence: Synthetic epitope
QPKSLVRLSL

SEQ ID NO: 37916 - protein, 10 aa, Artificial Sequence
  Description of Artificial Sequence: Synthetic epitope
QPKTIKNDML

SEQ ID NO: 37917 - protein, 10 aa, Artificial Sequence
  Description of Artificial Sequence: Synthetic epitope
QPLANERAYW

SEQ ID NO: 37918 - protein, 10 aa, Artificial Sequence
  Description of Artificial Sequence: Synthetic epitope
QPLATEDADS

SEQ ID NO: 37919 - protein, 10 aa, Artificial Sequence
  Description of Artificial Sequence: Synthetic epitope
QPLFAEAVDS

SEQ ID NO: 37920 - protein, 10 aa, Artificial Sequence
  Description of Artificial Sequence: Synthetic epitope
QPLKAKTSLP

SEQ ID NO: 37921 - protein, 10 aa, Artificial Sequence
  Description of Artificial Sequence: Synthetic epitope
QPLKKMSQKN

SEQ ID NO: 37922 - protein, 10 aa, Artificial Sequence
  Description of Artificial Sequence: Synthetic epitope
QPLKMGMMNN

SEQ ID NO: 37923 - protein, 10 aa, Artificial Sequence
  Description of Artificial Sequence: Synthetic epitope
QPLKVSNRKS

SEQ ID NO: 37924 - protein, 10 aa, Artificial Sequence
  Description of Artificial Sequence: Synthetic epitope
QPLLAAIRED

SEQ ID NO: 37925 - protein, 10 aa, Artificial Sequence
  Description of Artificial Sequence: Synthetic epitope
QPLLQRRQRL

SEQ ID NO: 37926 - protein, 10 aa, Artificial Sequence
  Description of Artificial Sequence: Synthetic epitope
QPLLTTAANT

SEQ ID NO: 37927 - protein, 10 aa, Artificial Sequence
  Description of Artificial Sequence: Synthetic epitope
QPLMTLSLQS

SEQ ID NO: 37928 - protein, 10 aa, Artificial Sequence
  Description of Artificial Sequence: Synthetic epitope
QPLQNVQLQA

SEQ ID NO: 37929 - protein, 10 aa, Artificial Sequence
  Description of Artificial Sequence: Synthetic epitope
QPLRQNAAEV

SEQ ID NO: 37930 - protein, 10 aa, Artificial Sequence
  Description of Artificial Sequence: Synthetic epitope
QPLRSAAGAA

SEQ ID NO: 37931 - protein, 10 aa, Artificial Sequence
  Description of Artificial Sequence: Synthetic epitope
QPLTNFKASS

SEQ ID NO: 37932 - protein, 10 aa, Artificial Sequence
  Description of Artificial Sequence: Synthetic epitope
QPLVAADEVF

SEQ ID NO: 37933 - protein, 10 aa, Artificial Sequence
  Description of Artificial Sequence: Synthetic epitope
QPLVSSVRPL

SEQ ID NO: 37934 - protein, 10 aa, Artificial Sequence
  Description of Artificial Sequence: Synthetic epitope
QPLVSVVDTI

SEQ ID NO: 37935 - protein, 10 aa, Artificial Sequence
  Description of Artificial Sequence: Synthetic epitope
QPMPEIYPET

SEQ ID NO: 37936 - protein, 10 aa, Artificial Sequence
  Description of Artificial Sequence: Synthetic epitope
QPMVDVSILQ

SEQ ID NO: 37937 - protein, 10 aa, Artificial Sequence
  Description of Artificial Sequence: Synthetic epitope
QPNKKTLKKL

SEQ ID NO: 37938 - protein, 10 aa, Artificial Sequence
  Description of Artificial Sequence: Synthetic epitope
QPNLTNQIQI

SEQ ID NO: 37939 - protein, 10 aa, Artificial Sequence
  Description of Artificial Sequence: Synthetic epitope
QPNQGWSSGK

SEQ ID NO: 37940 - protein, 10 aa, Artificial Sequence
  Description of Artificial Sequence: Synthetic epitope
QPNSEERGEN

SEQ ID NO: 37941 - protein, 10 aa, Artificial Sequence
  Description of Artificial Sequence: Synthetic epitope
QPNVNQSSRP

SEQ ID NO: 37942 - protein, 10 aa, Artificial Sequence
  Description of Artificial Sequence: Synthetic epitope
QPNVSDLSDK

SEQ ID NO: 37943 - protein, 10 aa, Artificial Sequence
  Description of Artificial Sequence: Synthetic epitope
QPPAKAQGRD

SEQ ID NO: 37944 - protein, 10 aa, Artificial Sequence
  Description of Artificial Sequence: Synthetic epitope
QPPEATLRAG

SEQ ID NO: 37945 - protein, 10 aa, Artificial Sequence
  Description of Artificial Sequence: Synthetic epitope
QPPILVTAHE

SEQ ID NO: 37946 - protein, 10 aa, Artificial Sequence
  Description of Artificial Sequence: Synthetic epitope
QPPLSKEGES

SEQ ID NO: 37947 - protein, 10 aa, Artificial Sequence
  Description of Artificial Sequence: Synthetic epitope
QPPMQYYNSQ

SEQ ID NO: 37948 - protein, 10 aa, Artificial Sequence
  Description of Artificial Sequence: Synthetic epitope
QPPQVKALYL

SEQ ID NO: 37949 - protein, 10 aa, Artificial Sequence
  Description of Artificial Sequence: Synthetic epitope
QPPSKSTIRP

SEQ ID NO: 37950 - protein, 10 aa, Artificial Sequence
  Description of Artificial Sequence: Synthetic epitope
QPQAADTISD

SEQ ID NO: 37951 - protein, 10 aa, Artificial Sequence
  Description of Artificial Sequence: Synthetic epitope
QPQAKAESKP

SEQ ID NO: 37952 - protein, 10 aa, Artificial Sequence
  Description of Artificial Sequence: Synthetic epitope
QPQAPPQQAA

SEQ ID NO: 37953 - protein, 10 aa, Artificial Sequence
  Description of Artificial Sequence: Synthetic epitope
QPQARQEEQV

SEQ ID NO: 37954 - protein, 10 aa, Artificial Sequence
  Description of Artificial Sequence: Synthetic epitope
QPQDVVEEKI

SEQ ID NO: 37955 - protein, 10 aa, Artificial Sequence
  Description of Artificial Sequence: Synthetic epitope
QPQEEIATKK

SEQ ID NO: 37956 - protein, 10 aa, Artificial Sequence
  Description of Artificial Sequence: Synthetic epitope
QPQFTAMNEP

SEQ ID NO: 37957 - protein, 10 aa, Artificial Sequence
  Description of Artificial Sequence: Synthetic epitope
QPQGSTSETP

SEQ ID NO: 37958 - protein, 10 aa, Artificial Sequence
  Description of Artificial Sequence: Synthetic epitope
QPQKLATVEM

SEQ ID NO: 37959 - protein, 10 aa, Artificial Sequence
  Description of Artificial Sequence: Synthetic epitope
QPQKTSQEPE

SEQ ID NO: 37960 - protein, 10 aa, Artificial Sequence
  Description of Artificial Sequence: Synthetic epitope
QPQKTSQEPE

SEQ ID NO: 37961 - protein, 10 aa, Artificial Sequence
  Description of Artificial Sequence: Synthetic epitope
QPQLDQQTLI

SEQ ID NO: 37962 - protein, 10 aa, Artificial Sequence
  Description of Artificial Sequence: Synthetic epitope
QPQNESNPEL

SEQ ID NO: 37963 - protein, 10 aa, Artificial Sequence
  Description of Artificial Sequence: Synthetic epitope
QPQNLNTDGP

SEQ ID NO: 37964 - protein, 10 aa, Artificial Sequence
  Description of Artificial Sequence: Synthetic epitope
QPQQAKADVL

SEQ ID NO: 37965 - protein, 10 aa, Artificial Sequence
  Description of Artificial Sequence: Synthetic epitope
QPQQAKKLGY

SEQ ID NO: 37966 - protein, 10 aa, Artificial Sequence
  Description of Artificial Sequence: Synthetic epitope
QPQQDMSQEG

SEQ ID NO: 37967 - protein, 10 aa, Artificial Sequence
  Description of Artificial Sequence: Synthetic epitope
QPQQIRPSQP

SEQ ID NO: 37968 - protein, 10 aa, Artificial Sequence
  Description of Artificial Sequence: Synthetic epitope
QPQQKIQIVP

SEQ ID NO: 37969 - protein, 10 aa, Artificial Sequence
  Description of Artificial Sequence: Synthetic epitope
QPQQTERNQS

SEQ ID NO: 37970 - protein, 10 aa, Artificial Sequence
  Description of Artificial Sequence: Synthetic epitope
QPQSMLDQQR

SEQ ID NO: 37971 - protein, 10 aa, Artificial Sequence
  Description of Artificial Sequence: Synthetic epitope
QPQTLDTNGF

SEQ ID NO: 37972 - protein, 10 aa, Artificial Sequence
  Description of Artificial Sequence: Synthetic epitope
QPQVQSSTQT

SEQ ID NO: 37973 - protein, 10 aa, Artificial Sequence
  Description of Artificial Sequence: Synthetic epitope
QPQVQTQPES

SEQ ID NO: 37974 - protein, 10 aa, Artificial Sequence
  Description of Artificial Sequence: Synthetic epitope
QPQYLNAIQT

SEQ ID NO: 37975 - protein, 10 aa, Artificial Sequence
  Description of Artificial Sequence: Synthetic epitope
QPRKALVSSE

SEQ ID NO: 37976 - protein, 10 aa, Artificial Sequence
  Description of Artificial Sequence: Synthetic epitope
QPRMATERGN

SEQ ID NO: 37977 - protein, 10 aa, Artificial Sequence
  Description of Artificial Sequence: Synthetic epitope
QPRSAQAVAP

SEQ ID NO: 37978 - protein, 10 aa, Artificial Sequence
  Description of Artificial Sequence: Synthetic epitope
QPRTAASSLA

SEQ ID NO: 37979 - protein, 10 aa, Artificial Sequence
  Description of Artificial Sequence: Synthetic epitope
QPRTNSLSFP

SEQ ID NO: 37980 - protein, 10 aa, Artificial Sequence
  Description of Artificial Sequence: Synthetic epitope
QPSAESLRQQ

SEQ ID NO: 37981 - protein, 10 aa, Artificial Sequence
  Description of Artificial Sequence: Synthetic epitope
QPSAVKQSDT

SEQ ID NO: 37982 - protein, 10 aa, Artificial Sequence
  Description of Artificial Sequence: Synthetic epitope
QPSAVVEVPS

SEQ ID NO: 37983 - protein, 10 aa, Artificial Sequence
  Description of Artificial Sequence: Synthetic epitope
QPSFEVISAQ

SEQ ID NO: 37984 - protein, 10 aa, Artificial Sequence
  Description of Artificial Sequence: Synthetic epitope
QPSGAQRAEA

SEQ ID NO: 37985 - protein, 10 aa, Artificial Sequence
  Description of Artificial Sequence: Synthetic epitope
QPSISVSEME

SEQ ID NO: 37986 - protein, 10 aa, Artificial Sequence
  Description of Artificial Sequence: Synthetic epitope
QPSKAQDSSM

SEQ ID NO: 37987 - protein, 10 aa, Artificial Sequence
  Description of Artificial Sequence: Synthetic epitope
QPSKKASKGK

SEQ ID NO: 37988 - protein, 10 aa, Artificial Sequence
  Description of Artificial Sequence: Synthetic epitope
QPSLRAAKEH

SEQ ID NO: 37989 - protein, 10 aa, Artificial Sequence
  Description of Artificial Sequence: Synthetic epitope
QPSPLASQFE

SEQ ID NO: 37990 - protein, 10 aa, Artificial Sequence
  Description of Artificial Sequence: Synthetic epitope
QPSQAQLTQP

SEQ ID NO: 37991 - protein, 10 aa, Artificial Sequence
  Description of Artificial Sequence: Synthetic epitope
QPSQEATMKD

SEQ ID NO: 37992 - protein, 10 aa, Artificial Sequence
  Description of Artificial Sequence: Synthetic epitope
QPSRKSRAKT

SEQ ID NO: 37993 - protein, 10 aa, Artificial Sequence
  Description of Artificial Sequence: Synthetic epitope
QPSSAVSSPT

SEQ ID NO: 37994 - protein, 10 aa, Artificial Sequence
  Description of Artificial Sequence: Synthetic epitope
QPSSKKSLSV

SEQ ID NO: 37995 - protein, 10 aa, Artificial Sequence
  Description of Artificial Sequence: Synthetic epitope
QPSSLAVVRG

SEQ ID NO: 37996 - protein, 10 aa, Artificial Sequence
  Description of Artificial Sequence: Synthetic epitope
QPSSLRSDDG

SEQ ID NO: 37997 - protein, 10 aa, Artificial Sequence
  Description of Artificial Sequence: Synthetic epitope
QPSSRTQTSS

SEQ ID NO: 37998 - protein, 10 aa, Artificial Sequence
  Description of Artificial Sequence: Synthetic epitope
QPTAHKSGQS

SEQ ID NO: 37999 - protein, 10 aa, Artificial Sequence
  Description of Artificial Sequence: Synthetic epitope
QPTGRETGVQ

SEQ ID NO: 38000 - protein, 10 aa, Artificial Sequence
  Description of Artificial Sequence: Synthetic epitope
QPTKTTNVNK

SEQ ID NO: 38001 - protein, 10 aa, Artificial Sequence
  Description of Artificial Sequence: Synthetic epitope
QPTLRTKPTI

SEQ ID NO: 38002 - protein, 10 aa, Artificial Sequence
  Description of Artificial Sequence: Synthetic epitope
QPTLSTSAPQ

SEQ ID NO: 38003 - protein, 10 aa, Artificial Sequence
  Description of Artificial Sequence: Synthetic epitope
QPTQVSEQEI

SEQ ID NO: 38004 - protein, 10 aa, Artificial Sequence
  Description of Artificial Sequence: Synthetic epitope
QPTRVANNSI

SEQ ID NO: 38005 - protein, 10 aa, Artificial Sequence
  Description of Artificial Sequence: Synthetic epitope
QPTSAFIQQP

SEQ ID NO: 38006 - protein, 10 aa, Artificial Sequence
  Description of Artificial Sequence: Synthetic epitope
QPTSVLDKAT

SEQ ID NO: 38007 - protein, 10 aa, Artificial Sequence
  Description of Artificial Sequence: Synthetic epitope
QPTSYMTSKH

SEQ ID NO: 38008 - protein, 10 aa, Artificial Sequence
  Description of Artificial Sequence: Synthetic epitope
QPTWTTFSYT

SEQ ID NO: 38009 - protein, 10 aa, Artificial Sequence
  Description of Artificial Sequence: Synthetic epitope
QPVGARSYKT

SEQ ID NO: 38010 - protein, 10 aa, Artificial Sequence
  Description of Artificial Sequence: Synthetic epitope
QPVKKQQENA

SEQ ID NO: 38011 - protein, 10 aa, Artificial Sequence
  Description of Artificial Sequence: Synthetic epitope
QPVLVAQVEP

SEQ ID NO: 38012 - protein, 10 aa, Artificial Sequence
  Description of Artificial Sequence: Synthetic epitope
QPVQSMKPVS

SEQ ID NO: 38013 - protein, 10 aa, Artificial Sequence
  Description of Artificial Sequence: Synthetic epitope
QPVSLLTQET

SEQ ID NO: 38014 - protein, 10 aa, Artificial Sequence
  Description of Artificial Sequence: Synthetic epitope
QPVSMAENGN

SEQ ID NO: 38015 - protein, 10 aa, Artificial Sequence
  Description of Artificial Sequence: Synthetic epitope
QPVSVSSVSP

SEQ ID NO: 38016 - protein, 10 aa, Artificial Sequence
  Description of Artificial Sequence: Synthetic epitope
QPVTVTELVD

SEQ ID NO: 38017 - protein, 10 aa, Artificial Sequence
  Description of Artificial Sequence: Synthetic epitope
QPVVNTVGQN

SEQ ID NO: 38018 - protein, 10 aa, Artificial Sequence
  Description of Artificial Sequence: Synthetic epitope
QPWPKHSLKH

SEQ ID NO: 38019 - protein, 10 aa, Artificial Sequence
  Description of Artificial Sequence: Synthetic epitope
QPYAKRARQE

SEQ ID NO: 38020 - protein, 10 aa, Artificial Sequence
  Description of Artificial Sequence: Synthetic epitope
QPYMLKEALY

SEQ ID NO: 38021 - protein, 10 aa, Artificial Sequence
  Description of Artificial Sequence: Synthetic epitope
QQAAEFYLMQ

SEQ ID NO: 38022 - protein, 10 aa, Artificial Sequence
  Description of Artificial Sequence: Synthetic epitope
QQAALLMQQE

SEQ ID NO: 38023 - protein, 10 aa, Artificial Sequence
  Description of Artificial Sequence: Synthetic epitope
QQAAMASILP

SEQ ID NO: 38024 - protein, 10 aa, Artificial Sequence
  Description of Artificial Sequence: Synthetic epitope
QQAAMQQEER

SEQ ID NO: 38025 - protein, 10 aa, Artificial Sequence
  Description of Artificial Sequence: Synthetic epitope
QQAAQEQAAL

SEQ ID NO: 38026 - protein, 10 aa, Artificial Sequence
  Description of Artificial Sequence: Synthetic epitope
QQAASNQLDS

SEQ ID NO: 38027 - protein, 10 aa, Artificial Sequence
  Description of Artificial Sequence: Synthetic epitope
QQAASQAQPG

SEQ ID NO: 38028 - protein, 10 aa, Artificial Sequence
  Description of Artificial Sequence: Synthetic epitope
QQAASVPILE

SEQ ID NO: 38029 - protein, 10 aa, Artificial Sequence
  Description of Artificial Sequence: Synthetic epitope
QQAASVVKQE

SEQ ID NO: 38030 - protein, 10 aa, Artificial Sequence
  Description of Artificial Sequence: Synthetic epitope
QQAEAERARE

SEQ ID NO: 38031 - protein, 10 aa, Artificial Sequence
  Description of Artificial Sequence: Synthetic epitope
QQAEEASQES

SEQ ID NO: 38032 - protein, 10 aa, Artificial Sequence
  Description of Artificial Sequence: Synthetic epitope
QQAEIQEKKE

SEQ ID NO: 38033 - protein, 10 aa, Artificial Sequence
  Description of Artificial Sequence: Synthetic epitope
QQAETTSEEL

SEQ ID NO: 38034 - protein, 10 aa, Artificial Sequence
  Description of Artificial Sequence: Synthetic epitope
QQAFIKPSPE

SEQ ID NO: 38035 - protein, 10 aa, Artificial Sequence
  Description of Artificial Sequence: Synthetic epitope
QQAFPVTEID

SEQ ID NO: 38036 - protein, 10 aa, Artificial Sequence
  Description of Artificial Sequence: Synthetic epitope
QQAGSVVLSP

SEQ ID NO: 38037 - protein, 10 aa, Artificial Sequence
  Description of Artificial Sequence: Synthetic epitope
QQAHEEAKVE

SEQ ID NO: 38038 - protein, 10 aa, Artificial Sequence
  Description of Artificial Sequence: Synthetic epitope
QQAHTSLADM

SEQ ID NO: 38039 - protein, 10 aa, Artificial Sequence
  Description of Artificial Sequence: Synthetic epitope
QQAHVKLKEH

SEQ ID NO: 38040 - protein, 10 aa, Artificial Sequence
  Description of Artificial Sequence: Synthetic epitope
QQAIDTWEEK

SEQ ID NO: 38041 - protein, 10 aa, Artificial Sequence
  Description of Artificial Sequence: Synthetic epitope
QQAIKQWQIS

SEQ ID NO: 38042 - protein, 10 aa, Artificial Sequence
  Description of Artificial Sequence: Synthetic epitope
QQAIQTTEAE

SEQ ID NO: 38043 - protein, 10 aa, Artificial Sequence
  Description of Artificial Sequence: Synthetic epitope
QQAKLVLNTA

SEQ ID NO: 38044 - protein, 10 aa, Artificial Sequence
  Description of Artificial Sequence: Synthetic epitope
QQAKSIKEQV

SEQ ID NO: 38045 - protein, 10 aa, Artificial Sequence
  Description of Artificial Sequence: Synthetic epitope
QQALDRTSQN

SEQ ID NO: 38046 - protein, 10 aa, Artificial Sequence
  Description of Artificial Sequence: Synthetic epitope
QQALLQSEKM

SEQ ID NO: 38047 - protein, 10 aa, Artificial Sequence
  Description of Artificial Sequence: Synthetic epitope
QQALQSAEMS

SEQ ID NO: 38048 - protein, 10 aa, Artificial Sequence
  Description of Artificial Sequence: Synthetic epitope
QQALSHSIEE

SEQ ID NO: 38049 - protein, 10 aa, Artificial Sequence
  Description of Artificial Sequence: Synthetic epitope
QQALSRLYFG

SEQ ID NO: 38050 - protein, 10 aa, Artificial Sequence
  Description of Artificial Sequence: Synthetic epitope
QQALSSLELL

SEQ ID NO: 38051 - protein, 10 aa, Artificial Sequence
  Description of Artificial Sequence: Synthetic epitope
QQALVQLQAA

SEQ ID NO: 38052 - protein, 10 aa, Artificial Sequence
  Description of Artificial Sequence: Synthetic epitope
QQAMKARQIT

SEQ ID NO: 38053 - protein, 10 aa, Artificial Sequence
  Description of Artificial Sequence: Synthetic epitope
QQAMMAAHDD

SEQ ID NO: 38054 - protein, 10 aa, Artificial Sequence
  Description of Artificial Sequence: Synthetic epitope
QQAPAMKTNS

SEQ ID NO: 38055 - protein, 10 aa, Artificial Sequence
  Description of Artificial Sequence: Synthetic epitope
QQAQAEAQRE

SEQ ID NO: 38056 - protein, 10 aa, Artificial Sequence
  Description of Artificial Sequence: Synthetic epitope
QQAQEDEEPE

SEQ ID NO: 38057 - protein, 10 aa, Artificial Sequence
  Description of Artificial Sequence: Synthetic epitope
QQAQELLQKY

SEQ ID NO: 38058 - protein, 10 aa, Artificial Sequence
  Description of Artificial Sequence: Synthetic epitope
QQAQHAIATE

SEQ ID NO: 38059 - protein, 10 aa, Artificial Sequence
  Description of Artificial Sequence: Synthetic epitope
QQAQLSTIRS

SEQ ID NO: 38060 - protein, 10 aa, Artificial Sequence
  Description of Artificial Sequence: Synthetic epitope
QQAQRASASL

SEQ ID NO: 38061 - protein, 10 aa, Artificial Sequence
  Description of Artificial Sequence: Synthetic epitope
QQAQSLTPQD

SEQ ID NO: 38062 - protein, 10 aa, Artificial Sequence
  Description of Artificial Sequence: Synthetic epitope
QQAQSVTSQD

SEQ ID NO: 38063 - protein, 10 aa, Artificial Sequence
  Description of Artificial Sequence: Synthetic epitope
QQAQTKAASQ

SEQ ID NO: 38064 - protein, 10 aa, Artificial Sequence
  Description of Artificial Sequence: Synthetic epitope
QQARAKSEEL

SEQ ID NO: 38065 - protein, 10 aa, Artificial Sequence
  Description of Artificial Sequence: Synthetic epitope
QQARLASTPV

SEQ ID NO: 38066 - protein, 10 aa, Artificial Sequence
  Description of Artificial Sequence: Synthetic epitope
QQARREKDET

SEQ ID NO: 38067 - protein, 10 aa, Artificial Sequence
  Description of Artificial Sequence: Synthetic epitope
QQARTELVST

SEQ ID NO: 38068 - protein, 10 aa, Artificial Sequence
  Description of Artificial Sequence: Synthetic epitope
QQASANSVFP

SEQ ID NO: 38069 - protein, 10 aa, Artificial Sequence
  Description of Artificial Sequence: Synthetic epitope
QQASATGSSQ

SEQ ID NO: 38070 - protein, 10 aa, Artificial Sequence
  Description of Artificial Sequence: Synthetic epitope
QQASLEDMIT

SEQ ID NO: 38071 - protein, 10 aa, Artificial Sequence
  Description of Artificial Sequence: Synthetic epitope
QQASQERNQM

SEQ ID NO: 38072 - protein, 10 aa, Artificial Sequence
  Description of Artificial Sequence: Synthetic epitope
QQASRSALKR

SEQ ID NO: 38073 - protein, 10 aa, Artificial Sequence
  Description of Artificial Sequence: Synthetic epitope
QQASSASSLG

SEQ ID NO: 38074 - protein, 10 aa, Artificial Sequence
  Description of Artificial Sequence: Synthetic epitope
QQASVTAGKV

SEQ ID NO: 38075 - protein, 10 aa, Artificial Sequence
  Description of Artificial Sequence: Synthetic epitope
QQATEFNQWK

SEQ ID NO: 38076 - protein, 10 aa, Artificial Sequence
  Description of Artificial Sequence: Synthetic epitope
QQATTVKNKD

SEQ ID NO: 38077 - protein, 10 aa, Artificial Sequence
  Description of Artificial Sequence: Synthetic epitope
QQAVEQIAKA

SEQ ID NO: 38078 - protein, 10 aa, Artificial Sequence
  Description of Artificial Sequence: Synthetic epitope
QQAVMAISQE

SEQ ID NO: 38079 - protein, 10 aa, Artificial Sequence
  Description of Artificial Sequence: Synthetic epitope
QQAVSLQGVD

SEQ ID NO: 38080 - protein, 10 aa, Artificial Sequence
  Description of Artificial Sequence: Synthetic epitope
QQAYAYPATA

SEQ ID NO: 38081 - protein, 10 aa, Artificial Sequence
  Description of Artificial Sequence: Synthetic epitope
QQDAEIEDNT

SEQ ID NO: 38082 - protein, 10 aa, Artificial Sequence
  Description of Artificial Sequence: Synthetic epitope
QQDEEKMPDP

SEQ ID NO: 38083 - protein, 10 aa, Artificial Sequence
  Description of Artificial Sequence: Synthetic epitope
QQDHLNQTDA

SEQ ID NO: 38084 - protein, 10 aa, Artificial Sequence
  Description of Artificial Sequence: Synthetic epitope
QQDILASSNS

SEQ ID NO: 38085 - protein, 10 aa, Artificial Sequence
  Description of Artificial Sequence: Synthetic epitope
QQDISVMTIP

SEQ ID NO: 38086 - protein, 10 aa, Artificial Sequence
  Description of Artificial Sequence: Synthetic epitope
QQDKSDQREN

SEQ ID NO: 38087 - protein, 10 aa, Artificial Sequence
  Description of Artificial Sequence: Synthetic epitope
QQDLKQESRF

SEQ ID NO: 38088 - protein, 10 aa, Artificial Sequence
  Description of Artificial Sequence: Synthetic epitope
QQDLQSTSDQ

SEQ ID NO: 38089 - protein, 10 aa, Artificial Sequence
  Description of Artificial Sequence: Synthetic epitope
QQDLQVLQEA

SEQ ID NO: 38090 - protein, 10 aa, Artificial Sequence
  Description of Artificial Sequence: Synthetic epitope
QQDLSALQKN

SEQ ID NO: 38091 - protein, 10 aa, Artificial Sequence
  Description of Artificial Sequence: Synthetic epitope
QQDLTSMAPG

SEQ ID NO: 38092 - protein, 10 aa, Artificial Sequence
  Description of Artificial Sequence: Synthetic epitope
QQDLVAAREA

SEQ ID NO: 38093 - protein, 10 aa, Artificial Sequence
  Description of Artificial Sequence: Synthetic epitope
QQDMAQFIHL

SEQ ID NO: 38094 - protein, 10 aa, Artificial Sequence
  Description of Artificial Sequence: Synthetic epitope
QQDMYNKKIP

SEQ ID NO: 38095 - protein, 10 aa, Artificial Sequence
  Description of Artificial Sequence: Synthetic epitope
QQDQPVPHGT

SEQ ID NO: 38096 - protein, 10 aa, Artificial Sequence
  Description of Artificial Sequence: Synthetic epitope
QQDSERAAHA

SEQ ID NO: 38097 - protein, 10 aa, Artificial Sequence
  Description of Artificial Sequence: Synthetic epitope
QQDSIDPSSR

SEQ ID NO: 38098 - protein, 10 aa, Artificial Sequence
  Description of Artificial Sequence: Synthetic epitope
QQDSLLVSLP

SEQ ID NO: 38099 - protein, 10 aa, Artificial Sequence
  Description of Artificial Sequence: Synthetic epitope
QQDSNHAWFN

SEQ ID NO: 38100 - protein, 10 aa, Artificial Sequence
  Description of Artificial Sequence: Synthetic epitope
QQDSTSSMQP

SEQ ID NO: 38101 - protein, 10 aa, Artificial Sequence
  Description of Artificial Sequence: Synthetic epitope
QQDTILAEGL

SEQ ID NO: 38102 - protein, 10 aa, Artificial Sequence
  Description of Artificial Sequence: Synthetic epitope
QQDTKEAEEL

SEQ ID NO: 38103 - protein, 10 aa, Artificial Sequence
  Description of Artificial Sequence: Synthetic epitope
QQDTLATIID

SEQ ID NO: 38104 - protein, 10 aa, Artificial Sequence
  Description of Artificial Sequence: Synthetic epitope
QQDVNKTKSR

SEQ ID NO: 38105 - protein, 10 aa, Artificial Sequence
  Description of Artificial Sequence: Synthetic epitope
QQDYAPLSRK

SEQ ID NO: 38106 - protein, 10 aa, Artificial Sequence
  Description of Artificial Sequence: Synthetic epitope
QQEADIQNSK

SEQ ID NO: 38107 - protein, 10 aa, Artificial Sequence
  Description of Artificial Sequence: Synthetic epitope
QQEAQGKAVA

SEQ ID NO: 38108 - protein, 10 aa, Artificial Sequence
  Description of Artificial Sequence: Synthetic epitope
QQEAQLVTIT

SEQ ID NO: 38109 - protein, 10 aa, Artificial Sequence
  Description of Artificial Sequence: Synthetic epitope
QQEARIRADQ

SEQ ID NO: 38110 - protein, 10 aa, Artificial Sequence
  Description of Artificial Sequence: Synthetic epitope
QQEAVARQTT

SEQ ID NO: 38111 - protein, 10 aa, Artificial Sequence
  Description of Artificial Sequence: Synthetic epitope
QQEEDQSSKT

SEQ ID NO: 38112 - protein, 10 aa, Artificial Sequence
  Description of Artificial Sequence: Synthetic epitope
QQEELKGMQL

SEQ ID NO: 38113 - protein, 10 aa, Artificial Sequence
  Description of Artificial Sequence: Synthetic epitope
QQEERAKQQG

SEQ ID NO: 38114 - protein, 10 aa, Artificial Sequence
  Description of Artificial Sequence: Synthetic epitope
QQEETNRVKE

SEQ ID NO: 38115 - protein, 10 aa, Artificial Sequence
  Description of Artificial Sequence: Synthetic epitope
QQEFLEVKQR

SEQ ID NO: 38116 - protein, 10 aa, Artificial Sequence
  Description of Artificial Sequence: Synthetic epitope
QQEHRLQGSE

SEQ ID NO: 38117 - protein, 10 aa, Artificial Sequence
  Description of Artificial Sequence: Synthetic epitope
QQEIAKMGTP

SEQ ID NO: 38118 - protein, 10 aa, Artificial Sequence
  Description of Artificial Sequence: Synthetic epitope
QQEISELKGA

SEQ ID NO: 38119 - protein, 10 aa, Artificial Sequence
  Description of Artificial Sequence: Synthetic epitope
QQEKESLQEK

SEQ ID NO: 38120 - protein, 10 aa, Artificial Sequence
  Description of Artificial Sequence: Synthetic epitope
QQEKMLLELS

SEQ ID NO: 38121 - protein, 10 aa, Artificial Sequence
  Description of Artificial Sequence: Synthetic epitope
QQEKRQLQDD

SEQ ID NO: 38122 - protein, 10 aa, Artificial Sequence
  Description of Artificial Sequence: Synthetic epitope
QQELIKQEQS

SEQ ID NO: 38123 - protein, 10 aa, Artificial Sequence
  Description of Artificial Sequence: Synthetic epitope
QQELITNELA

SEQ ID NO: 38124 - protein, 10 aa, Artificial Sequence
  Description of Artificial Sequence: Synthetic epitope
QQELNAFTRK

SEQ ID NO: 38125 - protein, 10 aa, Artificial Sequence
  Description of Artificial Sequence: Synthetic epitope
QQELTKTHSQ

SEQ ID NO: 38126 - protein, 10 aa, Artificial Sequence
  Description of Artificial Sequence: Synthetic epitope
QQELVEMSYP

SEQ ID NO: 38127 - protein, 10 aa, Artificial Sequence
  Description of Artificial Sequence: Synthetic epitope
QQEMAVLDRQ

SEQ ID NO: 38128 - protein, 10 aa, Artificial Sequence
  Description of Artificial Sequence: Synthetic epitope
QQEMMLRDEE

SEQ ID NO: 38129 - protein, 10 aa, Artificial Sequence
  Description of Artificial Sequence: Synthetic epitope
QQEMQLIIEN

SEQ ID NO: 38130 - protein, 10 aa, Artificial Sequence
  Description of Artificial Sequence: Synthetic epitope
QQENIINPQD

SEQ ID NO: 38131 - protein, 10 aa, Artificial Sequence
  Description of Artificial Sequence: Synthetic epitope
QQENLVEQAG

SEQ ID NO: 38132 - protein, 10 aa, Artificial Sequence
  Description of Artificial Sequence: Synthetic epitope
QQEQDQESAD

SEQ ID NO: 38133 - protein, 10 aa, Artificial Sequence
  Description of Artificial Sequence: Synthetic epitope
QQEQEIEQRL

SEQ ID NO: 38134 - protein, 10 aa, Artificial Sequence
  Description of Artificial Sequence: Synthetic epitope
QQEQEKEESS

SEQ ID NO: 38135 - protein, 10 aa, Artificial Sequence
  Description of Artificial Sequence: Synthetic epitope
QQEQNERSSA

SEQ ID NO: 38136 - protein, 10 aa, Artificial Sequence
  Description of Artificial Sequence: Synthetic epitope
QQERREQQEE

SEQ ID NO: 38137 - protein, 10 aa, Artificial Sequence
  Description of Artificial Sequence: Synthetic epitope
QQESSGIAGI

SEQ ID NO: 38138 - protein, 10 aa, Artificial Sequence
  Description of Artificial Sequence: Synthetic epitope
QQESYTYKDP

SEQ ID NO: 38139 - protein, 10 aa, Artificial Sequence
  Description of Artificial Sequence: Synthetic epitope
QQETSSKVSP

SEQ ID NO: 38140 - protein, 10 aa, Artificial Sequence
  Description of Artificial Sequence: Synthetic epitope
QQETSTLVET

SEQ ID NO: 38141 - protein, 10 aa, Artificial Sequence
  Description of Artificial Sequence: Synthetic epitope
QQEVDSQSYS

SEQ ID NO: 38142 - protein, 10 aa, Artificial Sequence
  Description of Artificial Sequence: Synthetic epitope
QQFAKAKATW

SEQ ID NO: 38143 - protein, 10 aa, Artificial Sequence
  Description of Artificial Sequence: Synthetic epitope
QQFALSNSAA

SEQ ID NO: 38144 - protein, 10 aa, Artificial Sequence
  Description of Artificial Sequence: Synthetic epitope
QQFEDQRVHS

SEQ ID NO: 38145 - protein, 10 aa, Artificial Sequence
  Description of Artificial Sequence: Synthetic epitope
QQFETSLELR

SEQ ID NO: 38146 - protein, 10 aa, Artificial Sequence
  Description of Artificial Sequence: Synthetic epitope
QQFIQASRHL

SEQ ID NO: 38147 - protein, 10 aa, Artificial Sequence
  Description of Artificial Sequence: Synthetic epitope
QQFIQVLLEE

SEQ ID NO: 38148 - protein, 10 aa, Artificial Sequence
  Description of Artificial Sequence: Synthetic epitope
QQFLEAQKSE

SEQ ID NO: 38149 - protein, 10 aa, Artificial Sequence
  Description of Artificial Sequence: Synthetic epitope
QQFLTLRPDQ

SEQ ID NO: 38150 - protein, 10 aa, Artificial Sequence
  Description of Artificial Sequence: Synthetic epitope
QQFNTMYMYR

SEQ ID NO: 38151 - protein, 10 aa, Artificial Sequence
  Description of Artificial Sequence: Synthetic epitope
QQFSLNQSRV

SEQ ID NO: 38152 - protein, 10 aa, Artificial Sequence
  Description of Artificial Sequence: Synthetic epitope
QQFTKDQMSH

SEQ ID NO: 38153 - protein, 10 aa, Artificial Sequence
  Description of Artificial Sequence: Synthetic epitope
QQFVAKDPQD

SEQ ID NO: 38154 - protein, 10 aa, Artificial Sequence
  Description of Artificial Sequence: Synthetic epitope
QQFYSQTVST

SEQ ID NO: 38155 - protein, 10 aa, Artificial Sequence
  Description of Artificial Sequence: Synthetic epitope
QQGELGQEEL

SEQ ID NO: 38156 - protein, 10 aa, Artificial Sequence
  Description of Artificial Sequence: Synthetic epitope
QQGEQTANGA

SEQ ID NO: 38157 - protein, 10 aa, Artificial Sequence
  Description of Artificial Sequence: Synthetic epitope
QQGGPDEKEK

SEQ ID NO: 38158 - protein, 10 aa, Artificial Sequence
  Description of Artificial Sequence: Synthetic epitope
QQGHPLHSFQ

SEQ ID NO: 38159 - protein, 10 aa, Artificial Sequence
  Description of Artificial Sequence: Synthetic epitope
QQGISKYLDA

SEQ ID NO: 38160 - protein, 10 aa, Artificial Sequence
  Description of Artificial Sequence: Synthetic epitope
QQGIYSIDED

SEQ ID NO: 38161 - protein, 10 aa, Artificial Sequence
  Description of Artificial Sequence: Synthetic epitope
QQGKLQEALM

SEQ ID NO: 38162 - protein, 10 aa, Artificial Sequence
  Description of Artificial Sequence: Synthetic epitope
QQGKRKTLQR

SEQ ID NO: 38163 - protein, 10 aa, Artificial Sequence
  Description of Artificial Sequence: Synthetic epitope
QQGLAQVEAG

SEQ ID NO: 38164 - protein, 10 aa, Artificial Sequence
  Description of Artificial Sequence: Synthetic epitope
QQGLNDRSDA

SEQ ID NO: 38165 - protein, 10 aa, Artificial Sequence
  Description of Artificial Sequence: Synthetic epitope
QQGLSNASTE

SEQ ID NO: 38166 - protein, 10 aa, Artificial Sequence
  Description of Artificial Sequence: Synthetic epitope
QQGLSQAKRD

SEQ ID NO: 38167 - protein, 10 aa, Artificial Sequence
  Description of Artificial Sequence: Synthetic epitope
QQGLSRASAE

SEQ ID NO: 38168 - protein, 10 aa, Artificial Sequence
  Description of Artificial Sequence: Synthetic epitope
QQGQATQVRI

SEQ ID NO: 38169 - protein, 10 aa, Artificial Sequence
  Description of Artificial Sequence: Synthetic epitope
QQGQQTTSST

SEQ ID NO: 38170 - protein, 10 aa, Artificial Sequence
  Description of Artificial Sequence: Synthetic epitope
QQGRASKQTE

SEQ ID NO: 38171 - protein, 10 aa, Artificial Sequence
  Description of Artificial Sequence: Synthetic epitope
QQGRYAPSYT

SEQ ID NO: 38172 - protein, 10 aa, Artificial Sequence
  Description of Artificial Sequence: Synthetic epitope
QQGSGVSGVQ

SEQ ID NO: 38173 - protein, 10 aa, Artificial Sequence
  Description of Artificial Sequence: Synthetic epitope
QQGSNVSDEK

SEQ ID NO: 38174 - protein, 10 aa, Artificial Sequence
  Description of Artificial Sequence: Synthetic epitope
QQGSSEASHN

SEQ ID NO: 38175 - protein, 10 aa, Artificial Sequence
  Description of Artificial Sequence: Synthetic epitope
QQGSSELNKQ

SEQ ID NO: 38176 - protein, 10 aa, Artificial Sequence
  Description of Artificial Sequence: Synthetic epitope
QQGSSLRQRK

SEQ ID NO: 38177 - protein, 10 aa, Artificial Sequence
  Description of Artificial Sequence: Synthetic epitope
QQGTAALQKE

SEQ ID NO: 38178 - protein, 10 aa, Artificial Sequence
  Description of Artificial Sequence: Synthetic epitope
QQGTAPAQAK

SEQ ID NO: 38179 - protein, 10 aa, Artificial Sequence
  Description of Artificial Sequence: Synthetic epitope
QQGTNHRVQS

SEQ ID NO: 38180 - protein, 10 aa, Artificial Sequence
  Description of Artificial Sequence: Synthetic epitope
QQGVQAENIT

SEQ ID NO: 38181 - protein, 10 aa, Artificial Sequence
  Description of Artificial Sequence: Synthetic epitope
QQHEETIAAM

SEQ ID NO: 38182 - protein, 10 aa, Artificial Sequence
  Description of Artificial Sequence: Synthetic epitope
QQHEQRKEAG

SEQ ID NO: 38183 - protein, 10 aa, Artificial Sequence
  Description of Artificial Sequence: Synthetic epitope
QQHGVAVTEP

SEQ ID NO: 38184 - protein, 10 aa, Artificial Sequence
  Description of Artificial Sequence: Synthetic epitope
QQHKIEDAAI

SEQ ID NO: 38185 - protein, 10 aa, Artificial Sequence
  Description of Artificial Sequence: Synthetic epitope
QQHKKYHGSQ

SEQ ID NO: 38186 - protein, 10 aa, Artificial Sequence
  Description of Artificial Sequence: Synthetic epitope
QQHKVHKYIT

SEQ ID NO: 38187 - protein, 10 aa, Artificial Sequence
  Description of Artificial Sequence: Synthetic epitope
QQHLETLRQV

SEQ ID NO: 38188 - protein, 10 aa, Artificial Sequence
  Description of Artificial Sequence: Synthetic epitope
QQHLNFSQVQ

SEQ ID NO: 38189 - protein, 10 aa, Artificial Sequence
  Description of Artificial Sequence: Synthetic epitope
QQHLSANMFV

SEQ ID NO: 38190 - protein, 10 aa, Artificial Sequence
  Description of Artificial Sequence: Synthetic epitope
QQHQAKLEEA

SEQ ID NO: 38191 - protein, 10 aa, Artificial Sequence
  Description of Artificial Sequence: Synthetic epitope
QQHQILATPL

SEQ ID NO: 38192 - protein, 10 aa, Artificial Sequence
  Description of Artificial Sequence: Synthetic epitope
QQHQKEPPKQ

SEQ ID NO: 38193 - protein, 10 aa, Artificial Sequence
  Description of Artificial Sequence: Synthetic epitope
QQHQQAASID

SEQ ID NO: 38194 - protein, 10 aa, Artificial Sequence
  Description of Artificial Sequence: Synthetic epitope
QQHQSYSSLE

SEQ ID NO: 38195 - protein, 10 aa, Artificial Sequence
  Description of Artificial Sequence: Synthetic epitope
QQHSEQMYSD

SEQ ID NO: 38196 - protein, 10 aa, Artificial Sequence
  Description of Artificial Sequence: Synthetic epitope
QQHSSEVPMT

SEQ ID NO: 38197 - protein, 10 aa, Artificial Sequence
  Description of Artificial Sequence: Synthetic epitope
QQHVKLARPR

SEQ ID NO: 38198 - protein, 10 aa, Artificial Sequence
  Description of Artificial Sequence: Synthetic epitope
QQIAFSELEM

SEQ ID NO: 38199 - protein, 10 aa, Artificial Sequence
  Description of Artificial Sequence: Synthetic epitope
QQIANELNYS

SEQ ID NO: 38200 - protein, 10 aa, Artificial Sequence
  Description of Artificial Sequence: Synthetic epitope
QQIATAKDKY

SEQ ID NO: 38201 - protein, 10 aa, Artificial Sequence
  Description of Artificial Sequence: Synthetic epitope
QQIDMTTPSQ

SEQ ID NO: 38202 - protein, 10 aa, Artificial Sequence
  Description of Artificial Sequence: Synthetic epitope
QQIDSVANAD

SEQ ID NO: 38203 - protein, 10 aa, Artificial Sequence
  Description of Artificial Sequence: Synthetic epitope
QQIEETEAAL

SEQ ID NO: 38204 - protein, 10 aa, Artificial Sequence
  Description of Artificial Sequence: Synthetic epitope
QQIFTSTMLS

SEQ ID NO: 38205 - protein, 10 aa, Artificial Sequence
  Description of Artificial Sequence: Synthetic epitope
QQIINAEAEV

SEQ ID NO: 38206 - protein, 10 aa, Artificial Sequence
  Description of Artificial Sequence: Synthetic epitope
QQIINQISKL

SEQ ID NO: 38207 - protein, 10 aa, Artificial Sequence
  Description of Artificial Sequence: Synthetic epitope
QQIKHEPIAS

SEQ ID NO: 38208 - protein, 10 aa, Artificial Sequence
  Description of Artificial Sequence: Synthetic epitope
QQIKMQSTKK

SEQ ID NO: 38209 - protein, 10 aa, Artificial Sequence
  Description of Artificial Sequence: Synthetic epitope
QQIKQKYKAT

SEQ ID NO: 38210 - protein, 10 aa, Artificial Sequence
  Description of Artificial Sequence: Synthetic epitope
QQIKTARTTM

SEQ ID NO: 38211 - protein, 10 aa, Artificial Sequence
  Description of Artificial Sequence: Synthetic epitope
QQILEKRAYI

SEQ ID NO: 38212 - protein, 10 aa, Artificial Sequence
  Description of Artificial Sequence: Synthetic epitope
QQILKRKNKQ

SEQ ID NO: 38213 - protein, 10 aa, Artificial Sequence
  Description of Artificial Sequence: Synthetic epitope
QQILKTERVV

SEQ ID NO: 38214 - protein, 10 aa, Artificial Sequence
  Description of Artificial Sequence: Synthetic epitope
QQIMALKPYD

SEQ ID NO: 38215 - protein, 10 aa, Artificial Sequence
  Description of Artificial Sequence: Synthetic epitope
QQIPEKSQKK

SEQ ID NO: 38216 - protein, 10 aa, Artificial Sequence
  Description of Artificial Sequence: Synthetic epitope
QQIQAAMGFK

SEQ ID NO: 38217 - protein, 10 aa, Artificial Sequence
  Description of Artificial Sequence: Synthetic epitope
QQIQDQIGVM

SEQ ID NO: 38218 - protein, 10 aa, Artificial Sequence
  Description of Artificial Sequence: Synthetic epitope
QQIQIQTVGA

SEQ ID NO: 38219 - protein, 10 aa, Artificial Sequence
  Description of Artificial Sequence: Synthetic epitope
QQIQKQLLIA

SEQ ID NO: 38220 - protein, 10 aa, Artificial Sequence
  Description of Artificial Sequence: Synthetic epitope
QQIQKTKMDL

SEQ ID NO: 38221 - protein, 10 aa, Artificial Sequence
  Description of Artificial Sequence: Synthetic epitope
QQIQPNVISV

SEQ ID NO: 38222 - protein, 10 aa, Artificial Sequence
  Description of Artificial Sequence: Synthetic epitope
QQIQQVNMPY

SEQ ID NO: 38223 - protein, 10 aa, Artificial Sequence
  Description of Artificial Sequence: Synthetic epitope
QQIRSAEKSH

SEQ ID NO: 38224 - protein, 10 aa, Artificial Sequence
  Description of Artificial Sequence: Synthetic epitope
QQISQDDQSS

SEQ ID NO: 38225 - protein, 10 aa, Artificial Sequence
  Description of Artificial Sequence: Synthetic epitope
QQISQLAQGM

SEQ ID NO: 38226 - protein, 10 aa, Artificial Sequence
  Description of Artificial Sequence: Synthetic epitope
QQISSAAQDK

SEQ ID NO: 38227 - protein, 10 aa, Artificial Sequence
  Description of Artificial Sequence: Synthetic epitope
QQITTNQWKN

SEQ ID NO: 38228 - protein, 10 aa, Artificial Sequence
  Description of Artificial Sequence: Synthetic epitope
QQITVQVEPA

SEQ ID NO: 38229 - protein, 10 aa, Artificial Sequence
  Description of Artificial Sequence: Synthetic epitope
QQIVFSSKTP

SEQ ID NO: 38230 - protein, 10 aa, Artificial Sequence
  Description of Artificial Sequence: Synthetic epitope
QQIVNLIEET

SEQ ID NO: 38231 - protein, 10 aa, Artificial Sequence
  Description of Artificial Sequence: Synthetic epitope
QQKAHTISQQ

SEQ ID NO: 38232 - protein, 10 aa, Artificial Sequence
  Description of Artificial Sequence: Synthetic epitope
QQKAKVKLDF

SEQ ID NO: 38233 - protein, 10 aa, Artificial Sequence
  Description of Artificial Sequence: Synthetic epitope
QQKALQSGPP

SEQ ID NO: 38234 - protein, 10 aa, Artificial Sequence
  Description of Artificial Sequence: Synthetic epitope
QQKANVEAIM

SEQ ID NO: 38235 - protein, 10 aa, Artificial Sequence
  Description of Artificial Sequence: Synthetic epitope
QQKASAELIE

SEQ ID NO: 38236 - protein, 10 aa, Artificial Sequence
  Description of Artificial Sequence: Synthetic epitope
QQKASDSKDK

SEQ ID NO: 38237 - protein, 10 aa, Artificial Sequence
  Description of Artificial Sequence: Synthetic epitope
QQKASMTKKV

SEQ ID NO: 38238 - protein, 10 aa, Artificial Sequence
  Description of Artificial Sequence: Synthetic epitope
QQKATLLGEE

SEQ ID NO: 38239 - protein, 10 aa, Artificial Sequence
  Description of Artificial Sequence: Synthetic epitope
QQKAVSVSEL

SEQ ID NO: 38240 - protein, 10 aa, Artificial Sequence
  Description of Artificial Sequence: Synthetic epitope
QQKDGTFAAG

SEQ ID NO: 38241 - protein, 10 aa, Artificial Sequence
  Description of Artificial Sequence: Synthetic epitope
QQKDSIPSIQ

SEQ ID NO: 38242 - protein, 10 aa, Artificial Sequence
  Description of Artificial Sequence: Synthetic epitope
QQKEATTEQQ

SEQ ID NO: 38243 - protein, 10 aa, Artificial Sequence
  Description of Artificial Sequence: Synthetic epitope
QQKEEAQLQK

SEQ ID NO: 38244 - protein, 10 aa, Artificial Sequence
  Description of Artificial Sequence: Synthetic epitope
QQKEELVAQK

SEQ ID NO: 38245 - protein, 10 aa, Artificial Sequence
  Description of Artificial Sequence: Synthetic epitope
QQKEIEQSKE

SEQ ID NO: 38246 - protein, 10 aa, Artificial Sequence
  Description of Artificial Sequence: Synthetic epitope
QQKEQAGEAE

SEQ ID NO: 38247 - protein, 10 aa, Artificial Sequence
  Description of Artificial Sequence: Synthetic epitope
QQKEQERQKE

SEQ ID NO: 38248 - protein, 10 aa, Artificial Sequence
  Description of Artificial Sequence: Synthetic epitope
QQKEQQVMKE

SEQ ID NO: 38249 - protein, 10 aa, Artificial Sequence
  Description of Artificial Sequence: Synthetic epitope
QQKGKTIKLA

SEQ ID NO: 38250 - protein, 10 aa, Artificial Sequence
  Description of Artificial Sequence: Synthetic epitope
QQKGMNISKS

SEQ ID NO: 38251 - protein, 10 aa, Artificial Sequence
  Description of Artificial Sequence: Synthetic epitope
QQKGQLTSVH

SEQ ID NO: 38252 - protein, 10 aa, Artificial Sequence
  Description of Artificial Sequence: Synthetic epitope
QQKGQQVIEE

SEQ ID NO: 38253 - protein, 10 aa, Artificial Sequence
  Description of Artificial Sequence: Synthetic epitope
QQKHSAELQS

SEQ ID NO: 38254 - protein, 10 aa, Artificial Sequence
  Description of Artificial Sequence: Synthetic epitope
QQKHSMILLE

SEQ ID NO: 38255 - protein, 10 aa, Artificial Sequence
  Description of Artificial Sequence: Synthetic epitope
QQKIDTMTKE

SEQ ID NO: 38256 - protein, 10 aa, Artificial Sequence
  Description of Artificial Sequence: Synthetic epitope
QQKIKDKKES

SEQ ID NO: 38257 - protein, 10 aa, Artificial Sequence
  Description of Artificial Sequence: Synthetic epitope
QQKIKSATIH

SEQ ID NO: 38258 - protein, 10 aa, Artificial Sequence
  Description of Artificial Sequence: Synthetic epitope
QQKINQLVID

SEQ ID NO: 38259 - protein, 10 aa, Artificial Sequence
  Description of Artificial Sequence: Synthetic epitope
QQKIVINTST

SEQ ID NO: 38260 - protein, 10 aa, Artificial Sequence
  Description of Artificial Sequence: Synthetic epitope
QQKKANRSSE

SEQ ID NO: 38261 - protein, 10 aa, Artificial Sequence
  Description of Artificial Sequence: Synthetic epitope
QQKKEQEEFL

SEQ ID NO: 38262 - protein, 10 aa, Artificial Sequence
  Description of Artificial Sequence: Synthetic epitope
QQKKGEYVNR

SEQ ID NO: 38263 - protein, 10 aa, Artificial Sequence
  Description of Artificial Sequence: Synthetic epitope
QQKKNTKLSS

SEQ ID NO: 38264 - protein, 10 aa, Artificial Sequence
  Description of Artificial Sequence: Synthetic epitope
QQKKTKIAQF

SEQ ID NO: 38265 - protein, 10 aa, Artificial Sequence
  Description of Artificial Sequence: Synthetic epitope
QQKLESSQLQ

SEQ ID NO: 38266 - protein, 10 aa, Artificial Sequence
  Description of Artificial Sequence: Synthetic epitope
QQKLKAVQAQ

SEQ ID NO: 38267 - protein, 10 aa, Artificial Sequence
  Description of Artificial Sequence: Synthetic epitope
QQKLMSKKNM

SEQ ID NO: 38268 - protein, 10 aa, Artificial Sequence
  Description of Artificial Sequence: Synthetic epitope
QQKLSSLQLE

SEQ ID NO: 38269 - protein, 10 aa, Artificial Sequence
  Description of Artificial Sequence: Synthetic epitope
QQKMVGIDKK

SEQ ID NO: 38270 - protein, 10 aa, Artificial Sequence
  Description of Artificial Sequence: Synthetic epitope
QQKPQPSILQ

SEQ ID NO: 38271 - protein, 10 aa, Artificial Sequence
  Description of Artificial Sequence: Synthetic epitope
QQKQATYRER

SEQ ID NO: 38272 - protein, 10 aa, Artificial Sequence
  Description of Artificial Sequence: Synthetic epitope
QQKQGQSVTS

SEQ ID NO: 38273 - protein, 10 aa, Artificial Sequence
  Description of Artificial Sequence: Synthetic epitope
QQKQLEEAEE

SEQ ID NO: 38274 - protein, 10 aa, Artificial Sequence
  Description of Artificial Sequence: Synthetic epitope
QQKQLLILQL

SEQ ID NO: 38275 - protein, 10 aa, Artificial Sequence
  Description of Artificial Sequence: Synthetic epitope
QQKQQNEKEP

SEQ ID NO: 38276 - protein, 10 aa, Artificial Sequence
  Description of Artificial Sequence: Synthetic epitope
QQKQSRDQEN

SEQ ID NO: 38277 - protein, 10 aa, Artificial Sequence
  Description of Artificial Sequence: Synthetic epitope
QQKRETLSPL

SEQ ID NO: 38278 - protein, 10 aa, Artificial Sequence
  Description of Artificial Sequence: Synthetic epitope
QQKRQEFLAS

SEQ ID NO: 38279 - protein, 10 aa, Artificial Sequence
  Description of Artificial Sequence: Synthetic epitope
QQKSAVEYAQ

SEQ ID NO: 38280 - protein, 10 aa, Artificial Sequence
  Description of Artificial Sequence: Synthetic epitope
QQKSAVEYAQ

SEQ ID NO: 38281 - protein, 10 aa, Artificial Sequence
  Description of Artificial Sequence: Synthetic epitope
QQKSPEQQET

SEQ ID NO: 38282 - protein, 10 aa, Artificial Sequence
  Description of Artificial Sequence: Synthetic epitope
QQKTARSNMD

SEQ ID NO: 38283 - protein, 10 aa, Artificial Sequence
  Description of Artificial Sequence: Synthetic epitope
QQKTMRVHQK

SEQ ID NO: 38284 - protein, 10 aa, Artificial Sequence
  Description of Artificial Sequence: Synthetic epitope
QQKTNYINEN

SEQ ID NO: 38285 - protein, 10 aa, Artificial Sequence
  Description of Artificial Sequence: Synthetic epitope
QQKTSALSPN

SEQ ID NO: 38286 - protein, 10 aa, Artificial Sequence
  Description of Artificial Sequence: Synthetic epitope
QQKVAASMPL

SEQ ID NO: 38287 - protein, 10 aa, Artificial Sequence
  Description of Artificial Sequence: Synthetic epitope
QQKVKLADIQ

SEQ ID NO: 38288 - protein, 10 aa, Artificial Sequence
  Description of Artificial Sequence: Synthetic epitope
QQKVNRRLQL

SEQ ID NO: 38289 - protein, 10 aa, Artificial Sequence
  Description of Artificial Sequence: Synthetic epitope
QQKVSQAFEQ

SEQ ID NO: 38290 - protein, 10 aa, Artificial Sequence
  Description of Artificial Sequence: Synthetic epitope
QQKYNQEKGT

SEQ ID NO: 38291 - protein, 10 aa, Artificial Sequence
  Description of Artificial Sequence: Synthetic epitope
QQLAAFSKRV

SEQ ID NO: 38292 - protein, 10 aa, Artificial Sequence
  Description of Artificial Sequence: Synthetic epitope
QQLAALIVAK

SEQ ID NO: 38293 - protein, 10 aa, Artificial Sequence
  Description of Artificial Sequence: Synthetic epitope
QQLAGKEREK

SEQ ID NO: 38294 - protein, 10 aa, Artificial Sequence
  Description of Artificial Sequence: Synthetic epitope
QQLAHHKAMM

SEQ ID NO: 38295 - protein, 10 aa, Artificial Sequence
  Description of Artificial Sequence: Synthetic epitope
QQLAPAARSS

SEQ ID NO: 38296 - protein, 10 aa, Artificial Sequence
  Description of Artificial Sequence: Synthetic epitope
QQLAPSVQKG

SEQ ID NO: 38297 - protein, 10 aa, Artificial Sequence
  Description of Artificial Sequence: Synthetic epitope
QQLAQDALEG

SEQ ID NO: 38298 - protein, 10 aa, Artificial Sequence
  Description of Artificial Sequence: Synthetic epitope
QQLATALHQQ

SEQ ID NO: 38299 - protein, 10 aa, Artificial Sequence
  Description of Artificial Sequence: Synthetic epitope
QQLDKAKEAV

SEQ ID NO: 38300 - protein, 10 aa, Artificial Sequence
  Description of Artificial Sequence: Synthetic epitope
QQLDSKISAN

SEQ ID NO: 38301 - protein, 10 aa, Artificial Sequence
  Description of Artificial Sequence: Synthetic epitope
QQLEAEAQKH

SEQ ID NO: 38302 - protein, 10 aa, Artificial Sequence
  Description of Artificial Sequence: Synthetic epitope
QQLEASLRML

SEQ ID NO: 38303 - protein, 10 aa, Artificial Sequence
  Description of Artificial Sequence: Synthetic epitope
QQLEATLETG

SEQ ID NO: 38304 - protein, 10 aa, Artificial Sequence
  Description of Artificial Sequence: Synthetic epitope
QQLEFLTTKS

SEQ ID NO: 38305 - protein, 10 aa, Artificial Sequence
  Description of Artificial Sequence: Synthetic epitope
QQLEKKLPVT

SEQ ID NO: 38306 - protein, 10 aa, Artificial Sequence
  Description of Artificial Sequence: Synthetic epitope
QQLESEQFLF

SEQ ID NO: 38307 - protein, 10 aa, Artificial Sequence
  Description of Artificial Sequence: Synthetic epitope
QQLESKEVSE

SEQ ID NO: 38308 - protein, 10 aa, Artificial Sequence
  Description of Artificial Sequence: Synthetic epitope
QQLESKKTEP

SEQ ID NO: 38309 - protein, 10 aa, Artificial Sequence
  Description of Artificial Sequence: Synthetic epitope
QQLESLQQEA

SEQ ID NO: 38310 - protein, 10 aa, Artificial Sequence
  Description of Artificial Sequence: Synthetic epitope
QQLFEEILSN

SEQ ID NO: 38311 - protein, 10 aa, Artificial Sequence
  Description of Artificial Sequence: Synthetic epitope
QQLGAESADS

SEQ ID NO: 38312 - protein, 10 aa, Artificial Sequence
  Description of Artificial Sequence: Synthetic epitope
QQLGEAHQAE

SEQ ID NO: 38313 - protein, 10 aa, Artificial Sequence
  Description of Artificial Sequence: Synthetic epitope
QQLHQSRLDY

SEQ ID NO: 38314 - protein, 10 aa, Artificial Sequence
  Description of Artificial Sequence: Synthetic epitope
QQLHVLRKEV

SEQ ID NO: 38315 - protein, 10 aa, Artificial Sequence
  Description of Artificial Sequence: Synthetic epitope
QQLINMVRFQ

SEQ ID NO: 38316 - protein, 10 aa, Artificial Sequence
  Description of Artificial Sequence: Synthetic epitope
QQLKGRVARE

SEQ ID NO: 38317 - protein, 10 aa, Artificial Sequence
  Description of Artificial Sequence: Synthetic epitope
QQLKKITAKQ

SEQ ID NO: 38318 - protein, 10 aa, Artificial Sequence
  Description of Artificial Sequence: Synthetic epitope
QQLKNQEKEE

SEQ ID NO: 38319 - protein, 10 aa, Artificial Sequence
  Description of Artificial Sequence: Synthetic epitope
QQLKRSQTRM

SEQ ID NO: 38320 - protein, 10 aa, Artificial Sequence
  Description of Artificial Sequence: Synthetic epitope
QQLKVLSSEL

SEQ ID NO: 38321 - protein, 10 aa, Artificial Sequence
  Description of Artificial Sequence: Synthetic epitope
QQLLAARSSQ

SEQ ID NO: 38322 - protein, 10 aa, Artificial Sequence
  Description of Artificial Sequence: Synthetic epitope
QQLLAKQVKA

SEQ ID NO: 38323 - protein, 10 aa, Artificial Sequence
  Description of Artificial Sequence: Synthetic epitope
QQLLATKEQR

SEQ ID NO: 38324 - protein, 10 aa, Artificial Sequence
  Description of Artificial Sequence: Synthetic epitope
QQLLELSEPA

SEQ ID NO: 38325 - protein, 10 aa, Artificial Sequence
  Description of Artificial Sequence: Synthetic epitope
QQLLEQTVSA

SEQ ID NO: 38326 - protein, 10 aa, Artificial Sequence
  Description of Artificial Sequence: Synthetic epitope
QQLLESDKYA

SEQ ID NO: 38327 - protein, 10 aa, Artificial Sequence
  Description of Artificial Sequence: Synthetic epitope
QQLLGKVQEN

SEQ ID NO: 38328 - protein, 10 aa, Artificial Sequence
  Description of Artificial Sequence: Synthetic epitope
QQLLHSDSLS

SEQ ID NO: 38329 - protein, 10 aa, Artificial Sequence
  Description of Artificial Sequence: Synthetic epitope
QQLLNVQEEM

SEQ ID NO: 38330 - protein, 10 aa, Artificial Sequence
  Description of Artificial Sequence: Synthetic epitope
QQLLQEQAML

SEQ ID NO: 38331 - protein, 10 aa, Artificial Sequence
  Description of Artificial Sequence: Synthetic epitope
QQLLSLRSLN

SEQ ID NO: 38332 - protein, 10 aa, Artificial Sequence
  Description of Artificial Sequence: Synthetic epitope
QQLLSVTAEL

SEQ ID NO: 38333 - protein, 10 aa, Artificial Sequence
  Description of Artificial Sequence: Synthetic epitope
QQLMQAAMPN

SEQ ID NO: 38334 - protein, 10 aa, Artificial Sequence
  Description of Artificial Sequence: Synthetic epitope
QQLNAQREFG

SEQ ID NO: 38335 - protein, 10 aa, Artificial Sequence
  Description of Artificial Sequence: Synthetic epitope
QQLNSEAQRS

SEQ ID NO: 38336 - protein, 10 aa, Artificial Sequence
  Description of Artificial Sequence: Synthetic epitope
QQLPTKGIQQ

SEQ ID NO: 38337 - protein, 10 aa, Artificial Sequence
  Description of Artificial Sequence: Synthetic epitope
QQLPVSSLFQ

SEQ ID NO: 38338 - protein, 10 aa, Artificial Sequence
  Description of Artificial Sequence: Synthetic epitope
QQLQDIKEQT

SEQ ID NO: 38339 - protein, 10 aa, Artificial Sequence
  Description of Artificial Sequence: Synthetic epitope
QQLQISVDQH

SEQ ID NO: 38340 - protein, 10 aa, Artificial Sequence
  Description of Artificial Sequence: Synthetic epitope
QQLQQALAPA

SEQ ID NO: 38341 - protein, 10 aa, Artificial Sequence
  Description of Artificial Sequence: Synthetic epitope
QQLQQRSAAV

SEQ ID NO: 38342 - protein, 10 aa, Artificial Sequence
  Description of Artificial Sequence: Synthetic epitope
QQLQQSTRNT

SEQ ID NO: 38343 - protein, 10 aa, Artificial Sequence
  Description of Artificial Sequence: Synthetic epitope
QQLQRETIPA

SEQ ID NO: 38344 - protein, 10 aa, Artificial Sequence
  Description of Artificial Sequence: Synthetic epitope
QQLQVYSKTG

SEQ ID NO: 38345 - protein, 10 aa, Artificial Sequence
  Description of Artificial Sequence: Synthetic epitope
QQLQYGGAVG

SEQ ID NO: 38346 - protein, 10 aa, Artificial Sequence
  Description of Artificial Sequence: Synthetic epitope
QQLRAQASDN

SEQ ID NO: 38347 - protein, 10 aa, Artificial Sequence
  Description of Artificial Sequence: Synthetic epitope
QQLRLKAAQE

SEQ ID NO: 38348 - protein, 10 aa, Artificial Sequence
  Description of Artificial Sequence: Synthetic epitope
QQLRQAANVR

SEQ ID NO: 38349 - protein, 10 aa, Artificial Sequence
  Description of Artificial Sequence: Synthetic epitope
QQLRRKINSR

SEQ ID NO: 38350 - protein, 10 aa, Artificial Sequence
  Description of Artificial Sequence: Synthetic epitope
QQLRSRTIVH

SEQ ID NO: 38351 - protein, 10 aa, Artificial Sequence
  Description of Artificial Sequence: Synthetic epitope
QQLRVIPKVT

SEQ ID NO: 38352 - protein, 10 aa, Artificial Sequence
  Description of Artificial Sequence: Synthetic epitope
QQLSHVNYRA

SEQ ID NO: 38353 - protein, 10 aa, Artificial Sequence
  Description of Artificial Sequence: Synthetic epitope
QQLSIRVPLR

SEQ ID NO: 38354 - protein, 10 aa, Artificial Sequence
  Description of Artificial Sequence: Synthetic epitope
QQLSLAVERE

SEQ ID NO: 38355 - protein, 10 aa, Artificial Sequence
  Description of Artificial Sequence: Synthetic epitope
QQLSLSQVNL

SEQ ID NO: 38356 - protein, 10 aa, Artificial Sequence
  Description of Artificial Sequence: Synthetic epitope
QQLSNAQLHS

SEQ ID NO: 38357 - protein, 10 aa, Artificial Sequence
  Description of Artificial Sequence: Synthetic epitope
QQLSPRSSQT

SEQ ID NO: 38358 - protein, 10 aa, Artificial Sequence
  Description of Artificial Sequence: Synthetic epitope
QQLSQNISSE

SEQ ID NO: 38359 - protein, 10 aa, Artificial Sequence
  Description of Artificial Sequence: Synthetic epitope
QQLSSAEQLQ

SEQ ID NO: 38360 - protein, 10 aa, Artificial Sequence
  Description of Artificial Sequence: Synthetic epitope
QQLSSEQVSR

SEQ ID NO: 38361 - protein, 10 aa, Artificial Sequence
  Description of Artificial Sequence: Synthetic epitope
QQLSVITVQR

SEQ ID NO: 38362 - protein, 10 aa, Artificial Sequence
  Description of Artificial Sequence: Synthetic epitope
QQLTALGAAQ

SEQ ID NO: 38363 - protein, 10 aa, Artificial Sequence
  Description of Artificial Sequence: Synthetic epitope
QQLTASDRKN

SEQ ID NO: 38364 - protein, 10 aa, Artificial Sequence
  Description of Artificial Sequence: Synthetic epitope
QQLTQAAQEL

SEQ ID NO: 38365 - protein, 10 aa, Artificial Sequence
  Description of Artificial Sequence: Synthetic epitope
QQLVASSLTS

SEQ ID NO: 38366 - protein, 10 aa, Artificial Sequence
  Description of Artificial Sequence: Synthetic epitope
QQLVKEKTKV

SEQ ID NO: 38367 - protein, 10 aa, Artificial Sequence
  Description of Artificial Sequence: Synthetic epitope
QQLVSGERVE

SEQ ID NO: 38368 - protein, 10 aa, Artificial Sequence
  Description of Artificial Sequence: Synthetic epitope
QQLYSSAALL

SEQ ID NO: 38369 - protein, 10 aa, Artificial Sequence
  Description of Artificial Sequence: Synthetic epitope
QQMAENQAAS

SEQ ID NO: 38370 - protein, 10 aa, Artificial Sequence
  Description of Artificial Sequence: Synthetic epitope
QQMAKEAYSS

SEQ ID NO: 38371 - protein, 10 aa, Artificial Sequence
  Description of Artificial Sequence: Synthetic epitope
QQMAKVQKLE

SEQ ID NO: 38372 - protein, 10 aa, Artificial Sequence
  Description of Artificial Sequence: Synthetic epitope
QQMEAQDKSR

SEQ ID NO: 38373 - protein, 10 aa, Artificial Sequence
  Description of Artificial Sequence: Synthetic epitope
QQMEEQVAQK

SEQ ID NO: 38374 - protein, 10 aa, Artificial Sequence
  Description of Artificial Sequence: Synthetic epitope
QQMIQSQRPM

SEQ ID NO: 38375 - protein, 10 aa, Artificial Sequence
  Description of Artificial Sequence: Synthetic epitope
QQMPIVYKEK

SEQ ID NO: 38376 - protein, 10 aa, Artificial Sequence
  Description of Artificial Sequence: Synthetic epitope
QQMPRAIEDP

SEQ ID NO: 38377 - protein, 10 aa, Artificial Sequence
  Description of Artificial Sequence: Synthetic epitope
QQMQDIQAEI

SEQ ID NO: 38378 - protein, 10 aa, Artificial Sequence
  Description of Artificial Sequence: Synthetic epitope
QQMQQISAAS

SEQ ID NO: 38379 - protein, 10 aa, Artificial Sequence
  Description of Artificial Sequence: Synthetic epitope
QQMQSQTAPH

SEQ ID NO: 38380 - protein, 10 aa, Artificial Sequence
  Description of Artificial Sequence: Synthetic epitope
QQMQVVTELK

SEQ ID NO: 38381 - protein, 10 aa, Artificial Sequence
  Description of Artificial Sequence: Synthetic epitope
QQMRFQVHTH

SEQ ID NO: 38382 - protein, 10 aa, Artificial Sequence
  Description of Artificial Sequence: Synthetic epitope
QQMRKAVKII

SEQ ID NO: 38383 - protein, 10 aa, Artificial Sequence
  Description of Artificial Sequence: Synthetic epitope
QQMRSKLNHN

SEQ ID NO: 38384 - protein, 10 aa, Artificial Sequence
  Description of Artificial Sequence: Synthetic epitope
QQMRTSQKDV

SEQ ID NO: 38385 - protein, 10 aa, Artificial Sequence
  Description of Artificial Sequence: Synthetic epitope
QQMSDHRYDK

SEQ ID NO: 38386 - protein, 10 aa, Artificial Sequence
  Description of Artificial Sequence: Synthetic epitope
QQMSYREQVL

SEQ ID NO: 38387 - protein, 10 aa, Artificial Sequence
  Description of Artificial Sequence: Synthetic epitope
QQMTRSQQMD

SEQ ID NO: 38388 - protein, 10 aa, Artificial Sequence
  Description of Artificial Sequence: Synthetic epitope
QQMTSSQKAL

SEQ ID NO: 38389 - protein, 10 aa, Artificial Sequence
  Description of Artificial Sequence: Synthetic epitope
QQMTYQQATL

SEQ ID NO: 38390 - protein, 10 aa, Artificial Sequence
  Description of Artificial Sequence: Synthetic epitope
QQNAELLSIT

SEQ ID NO: 38391 - protein, 10 aa, Artificial Sequence
  Description of Artificial Sequence: Synthetic epitope
QQNAELLSIT

SEQ ID NO: 38392 - protein, 10 aa, Artificial Sequence
  Description of Artificial Sequence: Synthetic epitope
QQNAESQGKA

SEQ ID NO: 38393 - protein, 10 aa, Artificial Sequence
  Description of Artificial Sequence: Synthetic epitope
QQNDDVSKKL

SEQ ID NO: 38394 - protein, 10 aa, Artificial Sequence
  Description of Artificial Sequence: Synthetic epitope
QQNDQNRPSE

SEQ ID NO: 38395 - protein, 10 aa, Artificial Sequence
  Description of Artificial Sequence: Synthetic epitope
QQNDVVKLTK

SEQ ID NO: 38396 - protein, 10 aa, Artificial Sequence
  Description of Artificial Sequence: Synthetic epitope
QQNEDKMRKS

SEQ ID NO: 38397 - protein, 10 aa, Artificial Sequence
  Description of Artificial Sequence: Synthetic epitope
QQNENKQLSG

SEQ ID NO: 38398 - protein, 10 aa, Artificial Sequence
  Description of Artificial Sequence: Synthetic epitope
QQNISASVPN

SEQ ID NO: 38399 - protein, 10 aa, Artificial Sequence
  Description of Artificial Sequence: Synthetic epitope
QQNKESEKKQ

SEQ ID NO: 38400 - protein, 10 aa, Artificial Sequence
  Description of Artificial Sequence: Synthetic epitope
QQNKKMIITE

SEQ ID NO: 38401 - protein, 10 aa, Artificial Sequence
  Description of Artificial Sequence: Synthetic epitope
QQNKKVEGGY

SEQ ID NO: 38402 - protein, 10 aa, Artificial Sequence
  Description of Artificial Sequence: Synthetic epitope
QQNKLQTDSI

SEQ ID NO: 38403 - protein, 10 aa, Artificial Sequence
  Description of Artificial Sequence: Synthetic epitope
QQNKLSVQSN

SEQ ID NO: 38404 - protein, 10 aa, Artificial Sequence
  Description of Artificial Sequence: Synthetic epitope
QQNNTESFAV

SEQ ID NO: 38405 - protein, 10 aa, Artificial Sequence
  Description of Artificial Sequence: Synthetic epitope
QQNQASLNRV

SEQ ID NO: 38406 - protein, 10 aa, Artificial Sequence
  Description of Artificial Sequence: Synthetic epitope
QQNQKQSNSK

SEQ ID NO: 38407 - protein, 10 aa, Artificial Sequence
  Description of Artificial Sequence: Synthetic epitope
QQNRNNRDKT

SEQ ID NO: 38408 - protein, 10 aa, Artificial Sequence
  Description of Artificial Sequence: Synthetic epitope
QQNVFVPMKY

SEQ ID NO: 38409 - protein, 10 aa, Artificial Sequence
  Description of Artificial Sequence: Synthetic epitope
QQNVMGTTEI

SEQ ID NO: 38410 - protein, 10 aa, Artificial Sequence
  Description of Artificial Sequence: Synthetic epitope
QQNVQLVPSA

SEQ ID NO: 38411 - protein, 10 aa, Artificial Sequence
  Description of Artificial Sequence: Synthetic epitope
QQPFASVMTD

SEQ ID NO: 38412 - protein, 10 aa, Artificial Sequence
  Description of Artificial Sequence: Synthetic epitope
QQPHENDVAA

SEQ ID NO: 38413 - protein, 10 aa, Artificial Sequence
  Description of Artificial Sequence: Synthetic epitope
QQPISNTQLE

SEQ ID NO: 38414 - protein, 10 aa, Artificial Sequence
  Description of Artificial Sequence: Synthetic epitope
QQPKSNSHAA

SEQ ID NO: 38415 - protein, 10 aa, Artificial Sequence
  Description of Artificial Sequence: Synthetic epitope
QQPKSQAEPL

SEQ ID NO: 38416 - protein, 10 aa, Artificial Sequence
  Description of Artificial Sequence: Synthetic epitope
QQPLQQIHMG

SEQ ID NO: 38417 - protein, 10 aa, Artificial Sequence
  Description of Artificial Sequence: Synthetic epitope
QQPMHQKPRY

SEQ ID NO: 38418 - protein, 10 aa, Artificial Sequence
  Description of Artificial Sequence: Synthetic epitope
QQPPLSQVFQ

SEQ ID NO: 38419 - protein, 10 aa, Artificial Sequence
  Description of Artificial Sequence: Synthetic epitope
QQPPLSQVFQ

SEQ ID NO: 38420 - protein, 10 aa, Artificial Sequence
  Description of Artificial Sequence: Synthetic epitope
QQPPLSQVFQ

SEQ ID NO: 38421 - protein, 10 aa, Artificial Sequence
  Description of Artificial Sequence: Synthetic epitope
QQPPLSQVFQ

SEQ ID NO: 38422 - protein, 10 aa, Artificial Sequence
  Description of Artificial Sequence: Synthetic epitope
QQPQQEKNEK

SEQ ID NO: 38423 - protein, 10 aa, Artificial Sequence
  Description of Artificial Sequence: Synthetic epitope
QQPQQEKNEK

SEQ ID NO: 38424 - protein, 10 aa, Artificial Sequence
  Description of Artificial Sequence: Synthetic epitope
QQPQVIHSAH

SEQ ID NO: 38425 - protein, 10 aa, Artificial Sequence
  Description of Artificial Sequence: Synthetic epitope
QQPRSQQSTA

SEQ ID NO: 38426 - protein, 10 aa, Artificial Sequence
  Description of Artificial Sequence: Synthetic epitope
QQPTEKVLAD

SEQ ID NO: 38427 - protein, 10 aa, Artificial Sequence
  Description of Artificial Sequence: Synthetic epitope
QQPTLDNDDS

SEQ ID NO: 38428 - protein, 10 aa, Artificial Sequence
  Description of Artificial Sequence: Synthetic epitope
QQPVPNSDAV

SEQ ID NO: 38429 - protein, 10 aa, Artificial Sequence
  Description of Artificial Sequence: Synthetic epitope
QQPVSTSVVR

SEQ ID NO: 38430 - protein, 10 aa, Artificial Sequence
  Description of Artificial Sequence: Synthetic epitope
QQRAAPQQKR

SEQ ID NO: 38431 - protein, 10 aa, Artificial Sequence
  Description of Artificial Sequence: Synthetic epitope
QQRAAQFQRK

SEQ ID NO: 38432 - protein, 10 aa, Artificial Sequence
  Description of Artificial Sequence: Synthetic epitope
QQRAEKAREE

SEQ ID NO: 38433 - protein, 10 aa, Artificial Sequence
  Description of Artificial Sequence: Synthetic epitope
QQRAHQITDE

SEQ ID NO: 38434 - protein, 10 aa, Artificial Sequence
  Description of Artificial Sequence: Synthetic epitope
QQRAQATRES

SEQ ID NO: 38435 - protein, 10 aa, Artificial Sequence
  Description of Artificial Sequence: Synthetic epitope
QQRARKLDAE

SEQ ID NO: 38436 - protein, 10 aa, Artificial Sequence
  Description of Artificial Sequence: Synthetic epitope
QQRDSQDASA

SEQ ID NO: 38437 - protein, 10 aa, Artificial Sequence
  Description of Artificial Sequence: Synthetic epitope
QQREKPRVQE

SEQ ID NO: 38438 - protein, 10 aa, Artificial Sequence
  Description of Artificial Sequence: Synthetic epitope
QQRGSNEEQV

SEQ ID NO: 38439 - protein, 10 aa, Artificial Sequence
  Description of Artificial Sequence: Synthetic epitope
QQRKAQRKED

SEQ ID NO: 38440 - protein, 10 aa, Artificial Sequence
  Description of Artificial Sequence: Synthetic epitope
QQRKQALVSD

SEQ ID NO: 38441 - protein, 10 aa, Artificial Sequence
  Description of Artificial Sequence: Synthetic epitope
QQRKQMIAVK

SEQ ID NO: 38442 - protein, 10 aa, Artificial Sequence
  Description of Artificial Sequence: Synthetic epitope
QQRLAQVAKA

SEQ ID NO: 38443 - protein, 10 aa, Artificial Sequence
  Description of Artificial Sequence: Synthetic epitope
QQRLTQQDTS

SEQ ID NO: 38444 - protein, 10 aa, Artificial Sequence
  Description of Artificial Sequence: Synthetic epitope
QQRMELLDRQ

SEQ ID NO: 38445 - protein, 10 aa, Artificial Sequence
  Description of Artificial Sequence: Synthetic epitope
QQRMMLVQTL

SEQ ID NO: 38446 - protein, 10 aa, Artificial Sequence
  Description of Artificial Sequence: Synthetic epitope
QQRQARETGI

SEQ ID NO: 38447 - protein, 10 aa, Artificial Sequence
  Description of Artificial Sequence: Synthetic epitope
QQRQDRRDNQ

SEQ ID NO: 38448 - protein, 10 aa, Artificial Sequence
  Description of Artificial Sequence: Synthetic epitope
QQRQKAQKAA

SEQ ID NO: 38449 - protein, 10 aa, Artificial Sequence
  Description of Artificial Sequence: Synthetic epitope
QQRQKLQIPS

SEQ ID NO: 38450 - protein, 10 aa, Artificial Sequence
  Description of Artificial Sequence: Synthetic epitope
QQRQNEASRE

SEQ ID NO: 38451 - protein, 10 aa, Artificial Sequence
  Description of Artificial Sequence: Synthetic epitope
QQRQQASEAD

SEQ ID NO: 38452 - protein, 10 aa, Artificial Sequence
  Description of Artificial Sequence: Synthetic epitope
QQRSKFLDSD

SEQ ID NO: 38453 - protein, 10 aa, Artificial Sequence
  Description of Artificial Sequence: Synthetic epitope
QQRSTSIEET

SEQ ID NO: 38454 - protein, 10 aa, Artificial Sequence
  Description of Artificial Sequence: Synthetic epitope
QQRSVSSQEE

SEQ ID NO: 38455 - protein, 10 aa, Artificial Sequence
  Description of Artificial Sequence: Synthetic epitope
QQRTPAAQRS

SEQ ID NO: 38456 - protein, 10 aa, Artificial Sequence
  Description of Artificial Sequence: Synthetic epitope
QQRVEEAPVK

SEQ ID NO: 38457 - protein, 10 aa, Artificial Sequence
  Description of Artificial Sequence: Synthetic epitope
QQSAALGNEA

SEQ ID NO: 38458 - protein, 10 aa, Artificial Sequence
  Description of Artificial Sequence: Synthetic epitope
QQSAATLLAN

SEQ ID NO: 38459 - protein, 10 aa, Artificial Sequence
  Description of Artificial Sequence: Synthetic epitope
QQSAEKLDAA

SEQ ID NO: 38460 - protein, 10 aa, Artificial Sequence
  Description of Artificial Sequence: Synthetic epitope
QQSAELASME

SEQ ID NO: 38461 - protein, 10 aa, Artificial Sequence
  Description of Artificial Sequence: Synthetic epitope
QQSAPASTTA

SEQ ID NO: 38462 - protein, 10 aa, Artificial Sequence
  Description of Artificial Sequence: Synthetic epitope
QQSAVRLTEI

SEQ ID NO: 38463 - protein, 10 aa, Artificial Sequence
  Description of Artificial Sequence: Synthetic epitope
QQSEAFLTSK

SEQ ID NO: 38464 - protein, 10 aa, Artificial Sequence
  Description of Artificial Sequence: Synthetic epitope
QQSEANELRN

SEQ ID NO: 38465 - protein, 10 aa, Artificial Sequence
  Description of Artificial Sequence: Synthetic epitope
QQSEDREYEV

SEQ ID NO: 38466 - protein, 10 aa, Artificial Sequence
  Description of Artificial Sequence: Synthetic epitope
QQSEFLDQTE

SEQ ID NO: 38467 - protein, 10 aa, Artificial Sequence
  Description of Artificial Sequence: Synthetic epitope
QQSFSKEAKA

SEQ ID NO: 38468 - protein, 10 aa, Artificial Sequence
  Description of Artificial Sequence: Synthetic epitope
QQSGEQKKRN

SEQ ID NO: 38469 - protein, 10 aa, Artificial Sequence
  Description of Artificial Sequence: Synthetic epitope
QQSISENEKL

SEQ ID NO: 38470 - protein, 10 aa, Artificial Sequence
  Description of Artificial Sequence: Synthetic epitope
QQSITMVRSK

SEQ ID NO: 38471 - protein, 10 aa, Artificial Sequence
  Description of Artificial Sequence: Synthetic epitope
QQSKQETKPS

SEQ ID NO: 38472 - protein, 10 aa, Artificial Sequence
  Description of Artificial Sequence: Synthetic epitope
QQSKSQKQKE

SEQ ID NO: 38473 - protein, 10 aa, Artificial Sequence
  Description of Artificial Sequence: Synthetic epitope
QQSKTKQNVL

SEQ ID NO: 38474 - protein, 10 aa, Artificial Sequence
  Description of Artificial Sequence: Synthetic epitope
QQSKVQNKGQ

SEQ ID NO: 38475 - protein, 10 aa, Artificial Sequence
  Description of Artificial Sequence: Synthetic epitope
QQSLADVSKD

SEQ ID NO: 38476 - protein, 10 aa, Artificial Sequence
  Description of Artificial Sequence: Synthetic epitope
QQSLELDDQD

SEQ ID NO: 38477 - protein, 10 aa, Artificial Sequence
  Description of Artificial Sequence: Synthetic epitope
QQSLELSLKE

SEQ ID NO: 38478 - protein, 10 aa, Artificial Sequence
  Description of Artificial Sequence: Synthetic epitope
QQSLGIQDQP

SEQ ID NO: 38479 - protein, 10 aa, Artificial Sequence
  Description of Artificial Sequence: Synthetic epitope
QQSLSGYSTL

SEQ ID NO: 38480 - protein, 10 aa, Artificial Sequence
  Description of Artificial Sequence: Synthetic epitope
QQSLSLAPVT

SEQ ID NO: 38481 - protein, 10 aa, Artificial Sequence
  Description of Artificial Sequence: Synthetic epitope
QQSLSQQGSL

SEQ ID NO: 38482 - protein, 10 aa, Artificial Sequence
  Description of Artificial Sequence: Synthetic epitope
QQSLVRAARR

SEQ ID NO: 38483 - protein, 10 aa, Artificial Sequence
  Description of Artificial Sequence: Synthetic epitope
QQSPDVNGMA

SEQ ID NO: 38484 - protein, 10 aa, Artificial Sequence
  Description of Artificial Sequence: Synthetic epitope
QQSPKDKLNN

SEQ ID NO: 38485 - protein, 10 aa, Artificial Sequence
  Description of Artificial Sequence: Synthetic epitope
QQSPQLTTVT

SEQ ID NO: 38486 - protein, 10 aa, Artificial Sequence
  Description of Artificial Sequence: Synthetic epitope
QQSQDVQKKE

SEQ ID NO: 38487 - protein, 10 aa, Artificial Sequence
  Description of Artificial Sequence: Synthetic epitope
QQSQEKAKNR

SEQ ID NO: 38488 - protein, 10 aa, Artificial Sequence
  Description of Artificial Sequence: Synthetic epitope
QQSQHQKVRE

SEQ ID NO: 38489 - protein, 10 aa, Artificial Sequence
  Description of Artificial Sequence: Synthetic epitope
QQSQTQSSEN

SEQ ID NO: 38490 - protein, 10 aa, Artificial Sequence
  Description of Artificial Sequence: Synthetic epitope
QQSREMTNKN

SEQ ID NO: 38491 - protein, 10 aa, Artificial Sequence
  Description of Artificial Sequence: Synthetic epitope
QQSSLYASNE

SEQ ID NO: 38492 - protein, 10 aa, Artificial Sequence
  Description of Artificial Sequence: Synthetic epitope
QQSSQSSKAK

SEQ ID NO: 38493 - protein, 10 aa, Artificial Sequence
  Description of Artificial Sequence: Synthetic epitope
QQSSRGENMM

SEQ ID NO: 38494 - protein, 10 aa, Artificial Sequence
  Description of Artificial Sequence: Synthetic epitope
QQSSRNRISS

SEQ ID NO: 38495 - protein, 10 aa, Artificial Sequence
  Description of Artificial Sequence: Synthetic epitope
QQSSTAKSAT

SEQ ID NO: 38496 - protein, 10 aa, Artificial Sequence
  Description of Artificial Sequence: Synthetic epitope
QQSSTAKSAT

SEQ ID NO: 38497 - protein, 10 aa, Artificial Sequence
  Description of Artificial Sequence: Synthetic epitope
QQSTAASLTS

SEQ ID NO: 38498 - protein, 10 aa, Artificial Sequence
  Description of Artificial Sequence: Synthetic epitope
QQSTAESEGA

SEQ ID NO: 38499 - protein, 10 aa, Artificial Sequence
  Description of Artificial Sequence: Synthetic epitope
QQSTNSSEFE

SEQ ID NO: 38500 - protein, 10 aa, Artificial Sequence
  Description of Artificial Sequence: Synthetic epitope
QQSTSLTFGE

SEQ ID NO: 38501 - protein, 10 aa, Artificial Sequence
  Description of Artificial Sequence: Synthetic epitope
QQSTTLNLWR

SEQ ID NO: 38502 - protein, 10 aa, Artificial Sequence
  Description of Artificial Sequence: Synthetic epitope
QQSVAHQQSG

SEQ ID NO: 38503 - protein, 10 aa, Artificial Sequence
  Description of Artificial Sequence: Synthetic epitope
QQSVAMDRIQ

SEQ ID NO: 38504 - protein, 10 aa, Artificial Sequence
  Description of Artificial Sequence: Synthetic epitope
QQSVIVNQKA

SEQ ID NO: 38505 - protein, 10 aa, Artificial Sequence
  Description of Artificial Sequence: Synthetic epitope
QQSYIFPSSI

SEQ ID NO: 38506 - protein, 10 aa, Artificial Sequence
  Description of Artificial Sequence: Synthetic epitope
QQSYNQSPYS

SEQ ID NO: 38507 - protein, 10 aa, Artificial Sequence
  Description of Artificial Sequence: Synthetic epitope
QQTAASLQIL

SEQ ID NO: 38508 - protein, 10 aa, Artificial Sequence
  Description of Artificial Sequence: Synthetic epitope
QQTAFSTIKS

SEQ ID NO: 38509 - protein, 10 aa, Artificial Sequence
  Description of Artificial Sequence: Synthetic epitope
QQTANRMRNR

SEQ ID NO: 38510 - protein, 10 aa, Artificial Sequence
  Description of Artificial Sequence: Synthetic epitope
QQTARKSISI

SEQ ID NO: 38511 - protein, 10 aa, Artificial Sequence
  Description of Artificial Sequence: Synthetic epitope
QQTATQIKFP

SEQ ID NO: 38512 - protein, 10 aa, Artificial Sequence
  Description of Artificial Sequence: Synthetic epitope
QQTEDKSLLN

SEQ ID NO: 38513 - protein, 10 aa, Artificial Sequence
  Description of Artificial Sequence: Synthetic epitope
QQTEFTQNAA

SEQ ID NO: 38514 - protein, 10 aa, Artificial Sequence
  Description of Artificial Sequence: Synthetic epitope
QQTEKAIELS

SEQ ID NO: 38515 - protein, 10 aa, Artificial Sequence
  Description of Artificial Sequence: Synthetic epitope
QQTEKETNTP

SEQ ID NO: 38516 - protein, 10 aa, Artificial Sequence
  Description of Artificial Sequence: Synthetic epitope
QQTEPQALLA

SEQ ID NO: 38517 - protein, 10 aa, Artificial Sequence
  Description of Artificial Sequence: Synthetic epitope
QQTFEEISQS

SEQ ID NO: 38518 - protein, 10 aa, Artificial Sequence
  Description of Artificial Sequence: Synthetic epitope
QQTFEKTDLK

SEQ ID NO: 38519 - protein, 10 aa, Artificial Sequence
  Description of Artificial Sequence: Synthetic epitope
QQTGQSEALE

SEQ ID NO: 38520 - protein, 10 aa, Artificial Sequence
  Description of Artificial Sequence: Synthetic epitope
QQTHQVVETE

SEQ ID NO: 38521 - protein, 10 aa, Artificial Sequence
  Description of Artificial Sequence: Synthetic epitope
QQTILKIKNK

SEQ ID NO: 38522 - protein, 10 aa, Artificial Sequence
  Description of Artificial Sequence: Synthetic epitope
QQTKITSAFK

SEQ ID NO: 38523 - protein, 10 aa, Artificial Sequence
  Description of Artificial Sequence: Synthetic epitope
QQTKLSSDDK

SEQ ID NO: 38524 - protein, 10 aa, Artificial Sequence
  Description of Artificial Sequence: Synthetic epitope
QQTLAQKDQA

SEQ ID NO: 38525 - protein, 10 aa, Artificial Sequence
  Description of Artificial Sequence: Synthetic epitope
QQTLKLLEEK

SEQ ID NO: 38526 - protein, 10 aa, Artificial Sequence
  Description of Artificial Sequence: Synthetic epitope
QQTLQLQEES

SEQ ID NO: 38527 - protein, 10 aa, Artificial Sequence
  Description of Artificial Sequence: Synthetic epitope
QQTPVASIQQ

SEQ ID NO: 38528 - protein, 10 aa, Artificial Sequence
  Description of Artificial Sequence: Synthetic epitope
QQTQASLKSH

SEQ ID NO: 38529 - protein, 10 aa, Artificial Sequence
  Description of Artificial Sequence: Synthetic epitope
QQTQISDLLS

SEQ ID NO: 38530 - protein, 10 aa, Artificial Sequence
  Description of Artificial Sequence: Synthetic epitope
QQTRISASSA

SEQ ID NO: 38531 - protein, 10 aa, Artificial Sequence
  Description of Artificial Sequence: Synthetic epitope
QQTSIKSSLL

SEQ ID NO: 38532 - protein, 10 aa, Artificial Sequence
  Description of Artificial Sequence: Synthetic epitope
QQTSISSPPT

SEQ ID NO: 38533 - protein, 10 aa, Artificial Sequence
  Description of Artificial Sequence: Synthetic epitope
QQTSKSSGLS

SEQ ID NO: 38534 - protein, 10 aa, Artificial Sequence
  Description of Artificial Sequence: Synthetic epitope
QQTSLPSQTQ

SEQ ID NO: 38535 - protein, 10 aa, Artificial Sequence
  Description of Artificial Sequence: Synthetic epitope
QQTSQETSRL

SEQ ID NO: 38536 - protein, 10 aa, Artificial Sequence
  Description of Artificial Sequence: Synthetic epitope
QQTSSDAVSQ

SEQ ID NO: 38537 - protein, 10 aa, Artificial Sequence
  Description of Artificial Sequence: Synthetic epitope
QQTSTPVLTQ

SEQ ID NO: 38538 - protein, 10 aa, Artificial Sequence
  Description of Artificial Sequence: Synthetic epitope
QQTTGSNGSD

SEQ ID NO: 38539 - protein, 10 aa, Artificial Sequence
  Description of Artificial Sequence: Synthetic epitope
QQTTNTVEEP

SEQ ID NO: 38540 - protein, 10 aa, Artificial Sequence
  Description of Artificial Sequence: Synthetic epitope
QQTTYLAQQY

SEQ ID NO: 38541 - protein, 10 aa, Artificial Sequence
  Description of Artificial Sequence: Synthetic epitope
QQVAEQEKLK

SEQ ID NO: 38542 - protein, 10 aa, Artificial Sequence
  Description of Artificial Sequence: Synthetic epitope
QQVAQAKTRY

SEQ ID NO: 38543 - protein, 10 aa, Artificial Sequence
  Description of Artificial Sequence: Synthetic epitope
QQVARKVMIQ

SEQ ID NO: 38544 - protein, 10 aa, Artificial Sequence
  Description of Artificial Sequence: Synthetic epitope
QQVASMQSQF

SEQ ID NO: 38545 - protein, 10 aa, Artificial Sequence
  Description of Artificial Sequence: Synthetic epitope
QQVATQQLAF

SEQ ID NO: 38546 - protein, 10 aa, Artificial Sequence
  Description of Artificial Sequence: Synthetic epitope
QQVATVIQSR

SEQ ID NO: 38547 - protein, 10 aa, Artificial Sequence
  Description of Artificial Sequence: Synthetic epitope
QQVDASAASA

SEQ ID NO: 38548 - protein, 10 aa, Artificial Sequence
  Description of Artificial Sequence: Synthetic epitope
QQVDTLTLEQ

SEQ ID NO: 38549 - protein, 10 aa, Artificial Sequence
  Description of Artificial Sequence: Synthetic epitope
QQVEEALSFT

SEQ ID NO: 38550 - protein, 10 aa, Artificial Sequence
  Description of Artificial Sequence: Synthetic epitope
QQVEEATVQD

SEQ ID NO: 38551 - protein, 10 aa, Artificial Sequence
  Description of Artificial Sequence: Synthetic epitope
QQVEQMMLAS

SEQ ID NO: 38552 - protein, 10 aa, Artificial Sequence
  Description of Artificial Sequence: Synthetic epitope
QQVESLRVSH

SEQ ID NO: 38553 - protein, 10 aa, Artificial Sequence
  Description of Artificial Sequence: Synthetic epitope
QQVEVAETQA

SEQ ID NO: 38554 - protein, 10 aa, Artificial Sequence
  Description of Artificial Sequence: Synthetic epitope
QQVFASAEEA

SEQ ID NO: 38555 - protein, 10 aa, Artificial Sequence
  Description of Artificial Sequence: Synthetic epitope
QQVFKNDARA

SEQ ID NO: 38556 - protein, 10 aa, Artificial Sequence
  Description of Artificial Sequence: Synthetic epitope
QQVGGASARI

SEQ ID NO: 38557 - protein, 10 aa, Artificial Sequence
  Description of Artificial Sequence: Synthetic epitope
QQVGVSMQSV

SEQ ID NO: 38558 - protein, 10 aa, Artificial Sequence
  Description of Artificial Sequence: Synthetic epitope
QQVIRVNVPK

SEQ ID NO: 38559 - protein, 10 aa, Artificial Sequence
  Description of Artificial Sequence: Synthetic epitope
QQVKTTQTSN

SEQ ID NO: 38560 - protein, 10 aa, Artificial Sequence
  Description of Artificial Sequence: Synthetic epitope
QQVLELKPME

SEQ ID NO: 38561 - protein, 10 aa, Artificial Sequence
  Description of Artificial Sequence: Synthetic epitope
QQVLKEASQM

SEQ ID NO: 38562 - protein, 10 aa, Artificial Sequence
  Description of Artificial Sequence: Synthetic epitope
QQVLKHNGSS

SEQ ID NO: 38563 - protein, 10 aa, Artificial Sequence
  Description of Artificial Sequence: Synthetic epitope
QQVLLAAKQV

SEQ ID NO: 38564 - protein, 10 aa, Artificial Sequence
  Description of Artificial Sequence: Synthetic epitope
QQVLQQLAEE

SEQ ID NO: 38565 - protein, 10 aa, Artificial Sequence
  Description of Artificial Sequence: Synthetic epitope
QQVLSNLQSR

SEQ ID NO: 38566 - protein, 10 aa, Artificial Sequence
  Description of Artificial Sequence: Synthetic epitope
QQVMSQIANV

SEQ ID NO: 38567 - protein, 10 aa, Artificial Sequence
  Description of Artificial Sequence: Synthetic epitope
QQVMSRRKEM

SEQ ID NO: 38568 - protein, 10 aa, Artificial Sequence
  Description of Artificial Sequence: Synthetic epitope
QQVNTLKMSE

SEQ ID NO: 38569 - protein, 10 aa, Artificial Sequence
  Description of Artificial Sequence: Synthetic epitope
QQVNTNESSG

SEQ ID NO: 38570 - protein, 10 aa, Artificial Sequence
  Description of Artificial Sequence: Synthetic epitope
QQVQADSKGT

SEQ ID NO: 38571 - protein, 10 aa, Artificial Sequence
  Description of Artificial Sequence: Synthetic epitope
QQVQPAMQAV

SEQ ID NO: 38572 - protein, 10 aa, Artificial Sequence
  Description of Artificial Sequence: Synthetic epitope
QQVQQTLEAR

SEQ ID NO: 38573 - protein, 10 aa, Artificial Sequence
  Description of Artificial Sequence: Synthetic epitope
QQVSDQRFQT

SEQ ID NO: 38574 - protein, 10 aa, Artificial Sequence
  Description of Artificial Sequence: Synthetic epitope
QQVSSLSESE

SEQ ID NO: 38575 - protein, 10 aa, Artificial Sequence
  Description of Artificial Sequence: Synthetic epitope
QQVSVDLSFK

SEQ ID NO: 38576 - protein, 10 aa, Artificial Sequence
  Description of Artificial Sequence: Synthetic epitope
QQVTILQQPP

SEQ ID NO: 38577 - protein, 10 aa, Artificial Sequence
  Description of Artificial Sequence: Synthetic epitope
QQVTNLNLAT

SEQ ID NO: 38578 - protein, 10 aa, Artificial Sequence
  Description of Artificial Sequence: Synthetic epitope
QQVVAQADLR

SEQ ID NO: 38579 - protein, 10 aa, Artificial Sequence
  Description of Artificial Sequence: Synthetic epitope
QQVVLENAAK

SEQ ID NO: 38580 - protein, 10 aa, Artificial Sequence
  Description of Artificial Sequence: Synthetic epitope
QQVVPYPQRA

SEQ ID NO: 38581 - protein, 10 aa, Artificial Sequence
  Description of Artificial Sequence: Synthetic epitope
QQVVQSQREV

SEQ ID NO: 38582 - protein, 10 aa, Artificial Sequence
  Description of Artificial Sequence: Synthetic epitope
QQVVRIALNA

SEQ ID NO: 38583 - protein, 10 aa, Artificial Sequence
  Description of Artificial Sequence: Synthetic epitope
QQVVSTFSDM

SEQ ID NO: 38584 - protein, 10 aa, Artificial Sequence
  Description of Artificial Sequence: Synthetic epitope
QQWEDDQRQA

SEQ ID NO: 38585 - protein, 10 aa, Artificial Sequence
  Description of Artificial Sequence: Synthetic epitope
QQWEPSYKRV

SEQ ID NO: 38586 - protein, 10 aa, Artificial Sequence
  Description of Artificial Sequence: Synthetic epitope
QQWIEFGGNA

SEQ ID NO: 38587 - protein, 10 aa, Artificial Sequence
  Description of Artificial Sequence: Synthetic epitope
QQWKPIEELQ

SEQ ID NO: 38588 - protein, 10 aa, Artificial Sequence
  Description of Artificial Sequence: Synthetic epitope
QQWMLYMIRL

SEQ ID NO: 38589 - protein, 10 aa, Artificial Sequence
  Description of Artificial Sequence: Synthetic epitope
QQWVAGVDQD

SEQ ID NO: 38590 - protein, 10 aa, Artificial Sequence
  Description of Artificial Sequence: Synthetic epitope
QQYAKKNKPN

SEQ ID NO: 38591 - protein, 10 aa, Artificial Sequence
  Description of Artificial Sequence: Synthetic epitope
QQYLQSALRT

SEQ ID NO: 38592 - protein, 10 aa, Artificial Sequence
  Description of Artificial Sequence: Synthetic epitope
QQYMVTTDEQ

SEQ ID NO: 38593 - protein, 10 aa, Artificial Sequence
  Description of Artificial Sequence: Synthetic epitope
QQYNRAEDSI

SEQ ID NO: 38594 - protein, 10 aa, Artificial Sequence
  Description of Artificial Sequence: Synthetic epitope
QQYNVVKTVK

SEQ ID NO: 38595 - protein, 10 aa, Artificial Sequence
  Description of Artificial Sequence: Synthetic epitope
QQYPFTADQE

SEQ ID NO: 38596 - protein, 10 aa, Artificial Sequence
  Description of Artificial Sequence: Synthetic epitope
QQYSPAQSQA

SEQ ID NO: 38597 - protein, 10 aa, Artificial Sequence
  Description of Artificial Sequence: Synthetic epitope
QQYSTIVKDY

SEQ ID NO: 38598 - protein, 10 aa, Artificial Sequence
  Description of Artificial Sequence: Synthetic epitope
QQYVQKSKEE

SEQ ID NO: 38599 - protein, 10 aa, Artificial Sequence
  Description of Artificial Sequence: Synthetic epitope
QRAAPRTKTG

SEQ ID NO: 38600 - protein, 10 aa, Artificial Sequence
  Description of Artificial Sequence: Synthetic epitope
QRAASAHRSL

SEQ ID NO: 38601 - protein, 10 aa, Artificial Sequence
  Description of Artificial Sequence: Synthetic epitope
QRAASATASP

SEQ ID NO: 38602 - protein, 10 aa, Artificial Sequence
  Description of Artificial Sequence: Synthetic epitope
QRAASTAPSS

SEQ ID NO: 38603 - protein, 10 aa, Artificial Sequence
  Description of Artificial Sequence: Synthetic epitope
QRADDILDLK

SEQ ID NO: 38604 - protein, 10 aa, Artificial Sequence
  Description of Artificial Sequence: Synthetic epitope
QRADEALNKD

SEQ ID NO: 38605 - protein, 10 aa, Artificial Sequence
  Description of Artificial Sequence: Synthetic epitope
QRADEASSLQ

SEQ ID NO: 38606 - protein, 10 aa, Artificial Sequence
  Description of Artificial Sequence: Synthetic epitope
QRADMNRLIM

SEQ ID NO: 38607 - protein, 10 aa, Artificial Sequence
  Description of Artificial Sequence: Synthetic epitope
QRAEAARELE

SEQ ID NO: 38608 - protein, 10 aa, Artificial Sequence
  Description of Artificial Sequence: Synthetic epitope
QRAEKDRISK

SEQ ID NO: 38609 - protein, 10 aa, Artificial Sequence
  Description of Artificial Sequence: Synthetic epitope
QRAERHALSA

SEQ ID NO: 38610 - protein, 10 aa, Artificial Sequence
  Description of Artificial Sequence: Synthetic epitope
QRAHALSDET

SEQ ID NO: 38611 - protein, 10 aa, Artificial Sequence
  Description of Artificial Sequence: Synthetic epitope
QRAILEESRQ

SEQ ID NO: 38612 - protein, 10 aa, Artificial Sequence
  Description of Artificial Sequence: Synthetic epitope
QRAISRRVQE

SEQ ID NO: 38613 - protein, 10 aa, Artificial Sequence
  Description of Artificial Sequence: Synthetic epitope
QRALLSRKAE

SEQ ID NO: 38614 - protein, 10 aa, Artificial Sequence
  Description of Artificial Sequence: Synthetic epitope
QRALRLVEAI

SEQ ID NO: 38615 - protein, 10 aa, Artificial Sequence
  Description of Artificial Sequence: Synthetic epitope
QRAMQAEDGR

SEQ ID NO: 38616 - protein, 10 aa, Artificial Sequence
  Description of Artificial Sequence: Synthetic epitope
QRAQAGLEEA

SEQ ID NO: 38617 - protein, 10 aa, Artificial Sequence
  Description of Artificial Sequence: Synthetic epitope
QRAQFAEATQ

SEQ ID NO: 38618 - protein, 10 aa, Artificial Sequence
  Description of Artificial Sequence: Synthetic epitope
QRAQPAVNGK

SEQ ID NO: 38619 - protein, 10 aa, Artificial Sequence
  Description of Artificial Sequence: Synthetic epitope
QRARARAQAE

SEQ ID NO: 38620 - protein, 10 aa, Artificial Sequence
  Description of Artificial Sequence: Synthetic epitope
QRARDQADQE

SEQ ID NO: 38621 - protein, 10 aa, Artificial Sequence
  Description of Artificial Sequence: Synthetic epitope
QRAREYIYMH

SEQ ID NO: 38622 - protein, 10 aa, Artificial Sequence
  Description of Artificial Sequence: Synthetic epitope
QRARMKARTR

SEQ ID NO: 38623 - protein, 10 aa, Artificial Sequence
  Description of Artificial Sequence: Synthetic epitope
QRARSNSTSV

SEQ ID NO: 38624 - protein, 10 aa, Artificial Sequence
  Description of Artificial Sequence: Synthetic epitope
QRASDLARQI

SEQ ID NO: 38625 - protein, 10 aa, Artificial Sequence
  Description of Artificial Sequence: Synthetic epitope
QRASTALSNE

SEQ ID NO: 38626 - protein, 10 aa, Artificial Sequence
  Description of Artificial Sequence: Synthetic epitope
QRATARESHA

SEQ ID NO: 38627 - protein, 10 aa, Artificial Sequence
  Description of Artificial Sequence: Synthetic epitope
QRATQEPVAK

SEQ ID NO: 38628 - protein, 10 aa, Artificial Sequence
  Description of Artificial Sequence: Synthetic epitope
QRATSTAKTW

SEQ ID NO: 38629 - protein, 10 aa, Artificial Sequence
  Description of Artificial Sequence: Synthetic epitope
QRAVAMSSGD

SEQ ID NO: 38630 - protein, 10 aa, Artificial Sequence
  Description of Artificial Sequence: Synthetic epitope
QRAVRLRESP

SEQ ID NO: 38631 - protein, 10 aa, Artificial Sequence
  Description of Artificial Sequence: Synthetic epitope
QRDDIVKGDP

SEQ ID NO: 38632 - protein, 10 aa, Artificial Sequence
  Description of Artificial Sequence: Synthetic epitope
QRDDNQLKRK

SEQ ID NO: 38633 - protein, 10 aa, Artificial Sequence
  Description of Artificial Sequence: Synthetic epitope
QRDEFGFLQY

SEQ ID NO: 38634 - protein, 10 aa, Artificial Sequence
  Description of Artificial Sequence: Synthetic epitope
QRDFETLKEK

SEQ ID NO: 38635 - protein, 10 aa, Artificial Sequence
  Description of Artificial Sequence: Synthetic epitope
QRDFNMIDLK

SEQ ID NO: 38636 - protein, 10 aa, Artificial Sequence
  Description of Artificial Sequence: Synthetic epitope
QRDGDASLNK

SEQ ID NO: 38637 - protein, 10 aa, Artificial Sequence
  Description of Artificial Sequence: Synthetic epitope
QRDHSAIPVI

SEQ ID NO: 38638 - protein, 10 aa, Artificial Sequence
  Description of Artificial Sequence: Synthetic epitope
QRDKTKQTDG

SEQ ID NO: 38639 - protein, 10 aa, Artificial Sequence
  Description of Artificial Sequence: Synthetic epitope
QRDLGDSKSG

SEQ ID NO: 38640 - protein, 10 aa, Artificial Sequence
  Description of Artificial Sequence: Synthetic epitope
QRDNVDLFVQ

SEQ ID NO: 38641 - protein, 10 aa, Artificial Sequence
  Description of Artificial Sequence: Synthetic epitope
QRDSKMAGEL

SEQ ID NO: 38642 - protein, 10 aa, Artificial Sequence
  Description of Artificial Sequence: Synthetic epitope
QRDSQEDWTT

SEQ ID NO: 38643 - protein, 10 aa, Artificial Sequence
  Description of Artificial Sequence: Synthetic epitope
QREADLLAAQ

SEQ ID NO: 38644 - protein, 10 aa, Artificial Sequence
  Description of Artificial Sequence: Synthetic epitope
QREANVDAAT

SEQ ID NO: 38645 - protein, 10 aa, Artificial Sequence
  Description of Artificial Sequence: Synthetic epitope
QREAQEAKER

SEQ ID NO: 38646 - protein, 10 aa, Artificial Sequence
  Description of Artificial Sequence: Synthetic epitope
QREAQTLQQY

SEQ ID NO: 38647 - protein, 10 aa, Artificial Sequence
  Description of Artificial Sequence: Synthetic epitope
QREAQTLQQY

SEQ ID NO: 38648 - protein, 10 aa, Artificial Sequence
  Description of Artificial Sequence: Synthetic epitope
QREARTMHKA

SEQ ID NO: 38649 - protein, 10 aa, Artificial Sequence
  Description of Artificial Sequence: Synthetic epitope
QREATLQKSN

SEQ ID NO: 38650 - protein, 10 aa, Artificial Sequence
  Description of Artificial Sequence: Synthetic epitope
QREEAQVEAG

SEQ ID NO: 38651 - protein, 10 aa, Artificial Sequence
  Description of Artificial Sequence: Synthetic epitope
QREEGHQAQQ

SEQ ID NO: 38652 - protein, 10 aa, Artificial Sequence
  Description of Artificial Sequence: Synthetic epitope
QREEIKFSHT

SEQ ID NO: 38653 - protein, 10 aa, Artificial Sequence
  Description of Artificial Sequence: Synthetic epitope
QREGQNYQQN

SEQ ID NO: 38654 - protein, 10 aa, Artificial Sequence
  Description of Artificial Sequence: Synthetic epitope
QREKEARIAK

SEQ ID NO: 38655 - protein, 10 aa, Artificial Sequence
  Description of Artificial Sequence: Synthetic epitope
QREKKELQSE

SEQ ID NO: 38656 - protein, 10 aa, Artificial Sequence
  Description of Artificial Sequence: Synthetic epitope
QREKKLKSHQ

SEQ ID NO: 38657 - protein, 10 aa, Artificial Sequence
  Description of Artificial Sequence: Synthetic epitope
QREKQDLGEE

SEQ ID NO: 38658 - protein, 10 aa, Artificial Sequence
  Description of Artificial Sequence: Synthetic epitope
QREKSEQVLD

SEQ ID NO: 38659 - protein, 10 aa, Artificial Sequence
  Description of Artificial Sequence: Synthetic epitope
QREKTLKVRG

SEQ ID NO: 38660 - protein, 10 aa, Artificial Sequence
  Description of Artificial Sequence: Synthetic epitope
QRELAQLDQS

SEQ ID NO: 38661 - protein, 10 aa, Artificial Sequence
  Description of Artificial Sequence: Synthetic epitope
QRELEEVAIK

SEQ ID NO: 38662 - protein, 10 aa, Artificial Sequence
  Description of Artificial Sequence: Synthetic epitope
QRELEQAALE

SEQ ID NO: 38663 - protein, 10 aa, Artificial Sequence
  Description of Artificial Sequence: Synthetic epitope
QREMASKTIP

SEQ ID NO: 38664 - protein, 10 aa, Artificial Sequence
  Description of Artificial Sequence: Synthetic epitope
QRENQKFPTD

SEQ ID NO: 38665 - protein, 10 aa, Artificial Sequence
  Description of Artificial Sequence: Synthetic epitope
QREPAQTEAA

SEQ ID NO: 38666 - protein, 10 aa, Artificial Sequence
  Description of Artificial Sequence: Synthetic epitope
QREPFTIAQG

SEQ ID NO: 38667 - protein, 10 aa, Artificial Sequence
  Description of Artificial Sequence: Synthetic epitope
QREQKANLAE

SEQ ID NO: 38668 - protein, 10 aa, Artificial Sequence
  Description of Artificial Sequence: Synthetic epitope
QREQSQREAP

SEQ ID NO: 38669 - protein, 10 aa, Artificial Sequence
  Description of Artificial Sequence: Synthetic epitope
QRERELSQRD

SEQ ID NO: 38670 - protein, 10 aa, Artificial Sequence
  Description of Artificial Sequence: Synthetic epitope
QRESKLTSGK

SEQ ID NO: 38671 - protein, 10 aa, Artificial Sequence
  Description of Artificial Sequence: Synthetic epitope
QRETEAALEF

SEQ ID NO: 38672 - protein, 10 aa, Artificial Sequence
  Description of Artificial Sequence: Synthetic epitope
QREVATRAVS

SEQ ID NO: 38673 - protein, 10 aa, Artificial Sequence
  Description of Artificial Sequence: Synthetic epitope
QRFHEHVHQP

SEQ ID NO: 38674 - protein, 10 aa, Artificial Sequence
  Description of Artificial Sequence: Synthetic epitope
QRFMAVSDVP

SEQ ID NO: 38675 - protein, 10 aa, Artificial Sequence
  Description of Artificial Sequence: Synthetic epitope
QRFMQIVAPD

SEQ ID NO: 38676 - protein, 10 aa, Artificial Sequence
  Description of Artificial Sequence: Synthetic epitope
QRFRFPSPIL

SEQ ID NO: 38677 - protein, 10 aa, Artificial Sequence
  Description of Artificial Sequence: Synthetic epitope
QRFSIKAHSR

SEQ ID NO: 38678 - protein, 10 aa, Artificial Sequence
  Description of Artificial Sequence: Synthetic epitope
QRFTGKINTS

SEQ ID NO: 38679 - protein, 10 aa, Artificial Sequence
  Description of Artificial Sequence: Synthetic epitope
QRGAATQRSS

SEQ ID NO: 38680 - protein, 10 aa, Artificial Sequence
  Description of Artificial Sequence: Synthetic epitope
QRGADHTASA

SEQ ID NO: 38681 - protein, 10 aa, Artificial Sequence
  Description of Artificial Sequence: Synthetic epitope
QRGAEDSGVK

SEQ ID NO: 38682 - protein, 10 aa, Artificial Sequence
  Description of Artificial Sequence: Synthetic epitope
QRGEEMLHQP

SEQ ID NO: 38683 - protein, 10 aa, Artificial Sequence
  Description of Artificial Sequence: Synthetic epitope
QRGGIKLHKN

SEQ ID NO: 38684 - protein, 10 aa, Artificial Sequence
  Description of Artificial Sequence: Synthetic epitope
QRGGIKLHKN

SEQ ID NO: 38685 - protein, 10 aa, Artificial Sequence
  Description of Artificial Sequence: Synthetic epitope
QRGIAEEQME

SEQ ID NO: 38686 - protein, 10 aa, Artificial Sequence
  Description of Artificial Sequence: Synthetic epitope
QRGKVKGKSS

SEQ ID NO: 38687 - protein, 10 aa, Artificial Sequence
  Description of Artificial Sequence: Synthetic epitope
QRGLKTNNAA

SEQ ID NO: 38688 - protein, 10 aa, Artificial Sequence
  Description of Artificial Sequence: Synthetic epitope
QRGMEVQDDL

SEQ ID NO: 38689 - protein, 10 aa, Artificial Sequence
  Description of Artificial Sequence: Synthetic epitope
QRGPVSSTSD

SEQ ID NO: 38690 - protein, 10 aa, Artificial Sequence
  Description of Artificial Sequence: Synthetic epitope
QRGTKRSLDP

SEQ ID NO: 38691 - protein, 10 aa, Artificial Sequence
  Description of Artificial Sequence: Synthetic epitope
QRGTNVQDQV

SEQ ID NO: 38692 - protein, 10 aa, Artificial Sequence
  Description of Artificial Sequence: Synthetic epitope
QRGVDKKAEM

SEQ ID NO: 38693 - protein, 10 aa, Artificial Sequence
  Description of Artificial Sequence: Synthetic epitope
QRHNQVPEQE

SEQ ID NO: 38694 - protein, 10 aa, Artificial Sequence
  Description of Artificial Sequence: Synthetic epitope
QRHQHQRAQP

SEQ ID NO: 38695 - protein, 10 aa, Artificial Sequence
  Description of Artificial Sequence: Synthetic epitope
QRHRKTFAEL

SEQ ID NO: 38696 - protein, 10 aa, Artificial Sequence
  Description of Artificial Sequence: Synthetic epitope
QRHSNRTAEE

SEQ ID NO: 38697 - protein, 10 aa, Artificial Sequence
  Description of Artificial Sequence: Synthetic epitope
QRIADIFVKK

SEQ ID NO: 38698 - protein, 10 aa, Artificial Sequence
  Description of Artificial Sequence: Synthetic epitope
QRIKIEANWD

SEQ ID NO: 38699 - protein, 10 aa, Artificial Sequence
  Description of Artificial Sequence: Synthetic epitope
QRIMLPFHIN

SEQ ID NO: 38700 - protein, 10 aa, Artificial Sequence
  Description of Artificial Sequence: Synthetic epitope
QRISQATAQI

SEQ ID NO: 38701 - protein, 10 aa, Artificial Sequence
  Description of Artificial Sequence: Synthetic epitope
QRISSQLVAA

SEQ ID NO: 38702 - protein, 10 aa, Artificial Sequence
  Description of Artificial Sequence: Synthetic epitope
QRISTKNEEP

SEQ ID NO: 38703 - protein, 10 aa, Artificial Sequence
  Description of Artificial Sequence: Synthetic epitope
QRISVQRESQ

SEQ ID NO: 38704 - protein, 10 aa, Artificial Sequence
  Description of Artificial Sequence: Synthetic epitope
QRISVQRESQ

SEQ ID NO: 38705 - protein, 10 aa, Artificial Sequence
  Description of Artificial Sequence: Synthetic epitope
QRITSADLHN

SEQ ID NO: 38706 - protein, 10 aa, Artificial Sequence
  Description of Artificial Sequence: Synthetic epitope
QRITSVAMKS

SEQ ID NO: 38707 - protein, 10 aa, Artificial Sequence
  Description of Artificial Sequence: Synthetic epitope
QRKAASDNGT

SEQ ID NO: 38708 - protein, 10 aa, Artificial Sequence
  Description of Artificial Sequence: Synthetic epitope
QRKADSVSDR

SEQ ID NO: 38709 - protein, 10 aa, Artificial Sequence
  Description of Artificial Sequence: Synthetic epitope
QRKAEVKELK

SEQ ID NO: 38710 - protein, 10 aa, Artificial Sequence
  Description of Artificial Sequence: Synthetic epitope
QRKALSAQQE

SEQ ID NO: 38711 - protein, 10 aa, Artificial Sequence
  Description of Artificial Sequence: Synthetic epitope
QRKASGLHEA

SEQ ID NO: 38712 - protein, 10 aa, Artificial Sequence
  Description of Artificial Sequence: Synthetic epitope
QRKESLAKDR

SEQ ID NO: 38713 - protein, 10 aa, Artificial Sequence
  Description of Artificial Sequence: Synthetic epitope
QRKFQKSRQP

SEQ ID NO: 38714 - protein, 10 aa, Artificial Sequence
  Description of Artificial Sequence: Synthetic epitope
QRKHIQIDLS

SEQ ID NO: 38715 - protein, 10 aa, Artificial Sequence
  Description of Artificial Sequence: Synthetic epitope
QRKIPAKVVR

SEQ ID NO: 38716 - protein, 10 aa, Artificial Sequence
  Description of Artificial Sequence: Synthetic epitope
QRKKSMSGKR

SEQ ID NO: 38717 - protein, 10 aa, Artificial Sequence
  Description of Artificial Sequence: Synthetic epitope
QRKKTELIMD

SEQ ID NO: 38718 - protein, 10 aa, Artificial Sequence
  Description of Artificial Sequence: Synthetic epitope
QRKLARQRSR

SEQ ID NO: 38719 - protein, 10 aa, Artificial Sequence
  Description of Artificial Sequence: Synthetic epitope
QRKMNALFEG

SEQ ID NO: 38720 - protein, 10 aa, Artificial Sequence
  Description of Artificial Sequence: Synthetic epitope
QRKNRESFQI

SEQ ID NO: 38721 - protein, 10 aa, Artificial Sequence
  Description of Artificial Sequence: Synthetic epitope
QRKNVWMINH

SEQ ID NO: 38722 - protein, 10 aa, Artificial Sequence
  Description of Artificial Sequence: Synthetic epitope
QRKQARTGEE

SEQ ID NO: 38723 - protein, 10 aa, Artificial Sequence
  Description of Artificial Sequence: Synthetic epitope
QRKQQTSAFL

SEQ ID NO: 38724 - protein, 10 aa, Artificial Sequence
  Description of Artificial Sequence: Synthetic epitope
QRKREAEERR

SEQ ID NO: 38725 - protein, 10 aa, Artificial Sequence
  Description of Artificial Sequence: Synthetic epitope
QRKRTTSVSK

SEQ ID NO: 38726 - protein, 10 aa, Artificial Sequence
  Description of Artificial Sequence: Synthetic epitope
QRKSQHADKG

SEQ ID NO: 38727 - protein, 10 aa, Artificial Sequence
  Description of Artificial Sequence: Synthetic epitope
QRKTALKNKE

SEQ ID NO: 38728 - protein, 10 aa, Artificial Sequence
  Description of Artificial Sequence: Synthetic epitope
QRKTSTTGLT

SEQ ID NO: 38729 - protein, 10 aa, Artificial Sequence
  Description of Artificial Sequence: Synthetic epitope
QRLATTADEP

SEQ ID NO: 38730 - protein, 10 aa, Artificial Sequence
  Description of Artificial Sequence: Synthetic epitope
QRLEKTLSST

SEQ ID NO: 38731 - protein, 10 aa, Artificial Sequence
  Description of Artificial Sequence: Synthetic epitope
QRLESVASEV

SEQ ID NO: 38732 - protein, 10 aa, Artificial Sequence
  Description of Artificial Sequence: Synthetic epitope
QRLGEEQKYE

SEQ ID NO: 38733 - protein, 10 aa, Artificial Sequence
  Description of Artificial Sequence: Synthetic epitope
QRLGMTASEM

SEQ ID NO: 38734 - protein, 10 aa, Artificial Sequence
  Description of Artificial Sequence: Synthetic epitope
QRLGQVRVSR

SEQ ID NO: 38735 - protein, 10 aa, Artificial Sequence
  Description of Artificial Sequence: Synthetic epitope
QRLISNRTSQ

SEQ ID NO: 38736 - protein, 10 aa, Artificial Sequence
  Description of Artificial Sequence: Synthetic epitope
QRLKSLRAYL

SEQ ID NO: 38737 - protein, 10 aa, Artificial Sequence
  Description of Artificial Sequence: Synthetic epitope
QRLLEITEGS

SEQ ID NO: 38738 - protein, 10 aa, Artificial Sequence
  Description of Artificial Sequence: Synthetic epitope
QRLLKTAKEK

SEQ ID NO: 38739 - protein, 10 aa, Artificial Sequence
  Description of Artificial Sequence: Synthetic epitope
QRLMQSKQTI

SEQ ID NO: 38740 - protein, 10 aa, Artificial Sequence
  Description of Artificial Sequence: Synthetic epitope
QRLMSASNSN

SEQ ID NO: 38741 - protein, 10 aa, Artificial Sequence
  Description of Artificial Sequence: Synthetic epitope
QRLMSQSMSS

SEQ ID NO: 38742 - protein, 10 aa, Artificial Sequence
  Description of Artificial Sequence: Synthetic epitope
QRLNMGTQGD

SEQ ID NO: 38743 - protein, 10 aa, Artificial Sequence
  Description of Artificial Sequence: Synthetic epitope
QRLQEVLQSE

SEQ ID NO: 38744 - protein, 10 aa, Artificial Sequence
  Description of Artificial Sequence: Synthetic epitope
QRLQIISQAL

SEQ ID NO: 38745 - protein, 10 aa, Artificial Sequence
  Description of Artificial Sequence: Synthetic epitope
QRLQKTASFR

SEQ ID NO: 38746 - protein, 10 aa, Artificial Sequence
  Description of Artificial Sequence: Synthetic epitope
QRLQNSKTTK

SEQ ID NO: 38747 - protein, 10 aa, Artificial Sequence
  Description of Artificial Sequence: Synthetic epitope
QRLQTQIASK

SEQ ID NO: 38748 - protein, 10 aa, Artificial Sequence
  Description of Artificial Sequence: Synthetic epitope
QRLQYLAFMQ

SEQ ID NO: 38749 - protein, 10 aa, Artificial Sequence
  Description of Artificial Sequence: Synthetic epitope
QRLRAVLLRL

SEQ ID NO: 38750 - protein, 10 aa, Artificial Sequence
  Description of Artificial Sequence: Synthetic epitope
QRLRETKPEV

SEQ ID NO: 38751 - protein, 10 aa, Artificial Sequence
  Description of Artificial Sequence: Synthetic epitope
QRLSDDSQSS

SEQ ID NO: 38752 - protein, 10 aa, Artificial Sequence
  Description of Artificial Sequence: Synthetic epitope
QRLSLQQEML

SEQ ID NO: 38753 - protein, 10 aa, Artificial Sequence
  Description of Artificial Sequence: Synthetic epitope
QRLSSALAAP

SEQ ID NO: 38754 - protein, 10 aa, Artificial Sequence
  Description of Artificial Sequence: Synthetic epitope
QRLTTVISPP

SEQ ID NO: 38755 - protein, 10 aa, Artificial Sequence
  Description of Artificial Sequence: Synthetic epitope
QRLVEERYSW

SEQ ID NO: 38756 - protein, 10 aa, Artificial Sequence
  Description of Artificial Sequence: Synthetic epitope
QRLVEREQAR

SEQ ID NO: 38757 - protein, 10 aa, Artificial Sequence
  Description of Artificial Sequence: Synthetic epitope
QRLYSEVAEE

SEQ ID NO: 38758 - protein, 10 aa, Artificial Sequence
  Description of Artificial Sequence: Synthetic epitope
QRMAEESISR

SEQ ID NO: 38759 - protein, 10 aa, Artificial Sequence
  Description of Artificial Sequence: Synthetic epitope
QRMEKGEHSI

SEQ ID NO: 38760 - protein, 10 aa, Artificial Sequence
  Description of Artificial Sequence: Synthetic epitope
QRMGSSESTD

SEQ ID NO: 38761 - protein, 10 aa, Artificial Sequence
  Description of Artificial Sequence: Synthetic epitope
QRMMDASVYL

SEQ ID NO: 38762 - protein, 10 aa, Artificial Sequence
  Description of Artificial Sequence: Synthetic epitope
QRMTSIPKEE

SEQ ID NO: 38763 - protein, 10 aa, Artificial Sequence
  Description of Artificial Sequence: Synthetic epitope
QRMTVAFEFE

SEQ ID NO: 38764 - protein, 10 aa, Artificial Sequence
  Description of Artificial Sequence: Synthetic epitope
QRNALQAISP

SEQ ID NO: 38765 - protein, 10 aa, Artificial Sequence
  Description of Artificial Sequence: Synthetic epitope
QRNASRDQVV

SEQ ID NO: 38766 - protein, 10 aa, Artificial Sequence
  Description of Artificial Sequence: Synthetic epitope
QRNDLQLRST

SEQ ID NO: 38767 - protein, 10 aa, Artificial Sequence
  Description of Artificial Sequence: Synthetic epitope
QRNESEPSEM

SEQ ID NO: 38768 - protein, 10 aa, Artificial Sequence
  Description of Artificial Sequence: Synthetic epitope
QRNKLSDTPK

SEQ ID NO: 38769 - protein, 10 aa, Artificial Sequence
  Description of Artificial Sequence: Synthetic epitope
QRNPKRITTR

SEQ ID NO: 38770 - protein, 10 aa, Artificial Sequence
  Description of Artificial Sequence: Synthetic epitope
QRNPKRITTR

SEQ ID NO: 38771 - protein, 10 aa, Artificial Sequence
  Description of Artificial Sequence: Synthetic epitope
QRNQLAGVKQ

SEQ ID NO: 38772 - protein, 10 aa, Artificial Sequence
  Description of Artificial Sequence: Synthetic epitope
QRNQPSRVRS

SEQ ID NO: 38773 - protein, 10 aa, Artificial Sequence
  Description of Artificial Sequence: Synthetic epitope
QRNSSEREGH

SEQ ID NO: 38774 - protein, 10 aa, Artificial Sequence
  Description of Artificial Sequence: Synthetic epitope
QRNSTSIEPR

SEQ ID NO: 38775 - protein, 10 aa, Artificial Sequence
  Description of Artificial Sequence: Synthetic epitope
QRNVPAAREP

SEQ ID NO: 38776 - protein, 10 aa, Artificial Sequence
  Description of Artificial Sequence: Synthetic epitope
QRPAAKKSAQ

SEQ ID NO: 38777 - protein, 10 aa, Artificial Sequence
  Description of Artificial Sequence: Synthetic epitope
QRPAALEKST

SEQ ID NO: 38778 - protein, 10 aa, Artificial Sequence
  Description of Artificial Sequence: Synthetic epitope
QRPQPHRNRA

SEQ ID NO: 38779 - protein, 10 aa, Artificial Sequence
  Description of Artificial Sequence: Synthetic epitope
QRPSSRASSR

SEQ ID NO: 38780 - protein, 10 aa, Artificial Sequence
  Description of Artificial Sequence: Synthetic epitope
QRPTSASRKK

SEQ ID NO: 38781 - protein, 10 aa, Artificial Sequence
  Description of Artificial Sequence: Synthetic epitope
QRQAELAAQK

SEQ ID NO: 38782 - protein, 10 aa, Artificial Sequence
  Description of Artificial Sequence: Synthetic epitope
QRQALSTETG

SEQ ID NO: 38783 - protein, 10 aa, Artificial Sequence
  Description of Artificial Sequence: Synthetic epitope
QRQGAEQEHQ

SEQ ID NO: 38784 - protein, 10 aa, Artificial Sequence
  Description of Artificial Sequence: Synthetic epitope
QRQITSVAKV

SEQ ID NO: 38785 - protein, 10 aa, Artificial Sequence
  Description of Artificial Sequence: Synthetic epitope
QRQITTVAQV

SEQ ID NO: 38786 - protein, 10 aa, Artificial Sequence
  Description of Artificial Sequence: Synthetic epitope
QRQKLFDTQH

SEQ ID NO: 38787 - protein, 10 aa, Artificial Sequence
  Description of Artificial Sequence: Synthetic epitope
QRQKRKQRYR

SEQ ID NO: 38788 - protein, 10 aa, Artificial Sequence
  Description of Artificial Sequence: Synthetic epitope
QRQLKEALER

SEQ ID NO: 38789 - protein, 10 aa, Artificial Sequence
  Description of Artificial Sequence: Synthetic epitope
QRQLSIALPQ

SEQ ID NO: 38790 - protein, 10 aa, Artificial Sequence
  Description of Artificial Sequence: Synthetic epitope
QRQLSQNQEE

SEQ ID NO: 38791 - protein, 10 aa, Artificial Sequence
  Description of Artificial Sequence: Synthetic epitope
QRQLVVTATD

SEQ ID NO: 38792 - protein, 10 aa, Artificial Sequence
  Description of Artificial Sequence: Synthetic epitope
QRQMTEQVRS

SEQ ID NO: 38793 - protein, 10 aa, Artificial Sequence
  Description of Artificial Sequence: Synthetic epitope
QRQNRARESR

SEQ ID NO: 38794 - protein, 10 aa, Artificial Sequence
  Description of Artificial Sequence: Synthetic epitope
QRQNSIRTNA

SEQ ID NO: 38795 - protein, 10 aa, Artificial Sequence
  Description of Artificial Sequence: Synthetic epitope
QRQPIISFLP

SEQ ID NO: 38796 - protein, 10 aa, Artificial Sequence
  Description of Artificial Sequence: Synthetic epitope
QRQQATLGAA

SEQ ID NO: 38797 - protein, 10 aa, Artificial Sequence
  Description of Artificial Sequence: Synthetic epitope
QRQQESGGNQ

SEQ ID NO: 38798 - protein, 10 aa, Artificial Sequence
  Description of Artificial Sequence: Synthetic epitope
QRQRRSVYGT

SEQ ID NO: 38799 - protein, 10 aa, Artificial Sequence
  Description of Artificial Sequence: Synthetic epitope
QRQSEQVEKN

SEQ ID NO: 38800 - protein, 10 aa, Artificial Sequence
  Description of Artificial Sequence: Synthetic epitope
QRQSVSDLEK

SEQ ID NO: 38801 - protein, 10 aa, Artificial Sequence
  Description of Artificial Sequence: Synthetic epitope
QRQTVSLQEQ

SEQ ID NO: 38802 - protein, 10 aa, Artificial Sequence
  Description of Artificial Sequence: Synthetic epitope
QRQTVVRTLN

SEQ ID NO: 38803 - protein, 10 aa, Artificial Sequence
  Description of Artificial Sequence: Synthetic epitope
QRQVENPRSE

SEQ ID NO: 38804 - protein, 10 aa, Artificial Sequence
  Description of Artificial Sequence: Synthetic epitope
QRQVQLDAQA

SEQ ID NO: 38805 - protein, 10 aa, Artificial Sequence
  Description of Artificial Sequence: Synthetic epitope
QRQVRIPQMP

SEQ ID NO: 38806 - protein, 10 aa, Artificial Sequence
  Description of Artificial Sequence: Synthetic epitope
QRRAAEAQLG

SEQ ID NO: 38807 - protein, 10 aa, Artificial Sequence
  Description of Artificial Sequence: Synthetic epitope
QRRASTVSSV

SEQ ID NO: 38808 - protein, 10 aa, Artificial Sequence
  Description of Artificial Sequence: Synthetic epitope
QRREQASVGE

SEQ ID NO: 38809 - protein, 10 aa, Artificial Sequence
  Description of Artificial Sequence: Synthetic epitope
QRRGGVAKSK

SEQ ID NO: 38810 - protein, 10 aa, Artificial Sequence
  Description of Artificial Sequence: Synthetic epitope
QRRIQESAKQ

SEQ ID NO: 38811 - protein, 10 aa, Artificial Sequence
  Description of Artificial Sequence: Synthetic epitope
QRRKNMSHEA

SEQ ID NO: 38812 - protein, 10 aa, Artificial Sequence
  Description of Artificial Sequence: Synthetic epitope
QRRKQFQKAE

SEQ ID NO: 38813 - protein, 10 aa, Artificial Sequence
  Description of Artificial Sequence: Synthetic epitope
QRRPRLVIEE

SEQ ID NO: 38814 - protein, 10 aa, Artificial Sequence
  Description of Artificial Sequence: Synthetic epitope
QRRQVVEAAQ

SEQ ID NO: 38815 - protein, 10 aa, Artificial Sequence
  Description of Artificial Sequence: Synthetic epitope
QRRSATSSLR

SEQ ID NO: 38816 - protein, 10 aa, Artificial Sequence
  Description of Artificial Sequence: Synthetic epitope
QRRSITRDSD

SEQ ID NO: 38817 - protein, 10 aa, Artificial Sequence
  Description of Artificial Sequence: Synthetic epitope
QRRSRSNSSP

SEQ ID NO: 38818 - protein, 10 aa, Artificial Sequence
  Description of Artificial Sequence: Synthetic epitope
QRRTFEQRVE

SEQ ID NO: 38819 - protein, 10 aa, Artificial Sequence
  Description of Artificial Sequence: Synthetic epitope
QRRTFEQRVE

SEQ ID NO: 38820 - protein, 10 aa, Artificial Sequence
  Description of Artificial Sequence: Synthetic epitope
QRRVQISESL

SEQ ID NO: 38821 - protein, 10 aa, Artificial Sequence
  Description of Artificial Sequence: Synthetic epitope
QRRVQSYEFL

SEQ ID NO: 38822 - protein, 10 aa, Artificial Sequence
  Description of Artificial Sequence: Synthetic epitope
QRSASELTAG

SEQ ID NO: 38823 - protein, 10 aa, Artificial Sequence
  Description of Artificial Sequence: Synthetic epitope
QRSEFSSRSG

SEQ ID NO: 38824 - protein, 10 aa, Artificial Sequence
  Description of Artificial Sequence: Synthetic epitope
QRSESSKMDK

SEQ ID NO: 38825 - protein, 10 aa, Artificial Sequence
  Description of Artificial Sequence: Synthetic epitope
QRSFQTLDQE

SEQ ID NO: 38826 - protein, 10 aa, Artificial Sequence
  Description of Artificial Sequence: Synthetic epitope
QRSFTQVTLP

SEQ ID NO: 38827 - protein, 10 aa, Artificial Sequence
  Description of Artificial Sequence: Synthetic epitope
QRSGLNQIPN

SEQ ID NO: 38828 - protein, 10 aa, Artificial Sequence
  Description of Artificial Sequence: Synthetic epitope
QRSKNNKTLE

SEQ ID NO: 38829 - protein, 10 aa, Artificial Sequence
  Description of Artificial Sequence: Synthetic epitope
QRSKRTQLEE

SEQ ID NO: 38830 - protein, 10 aa, Artificial Sequence
  Description of Artificial Sequence: Synthetic epitope
QRSKSDPSRL

SEQ ID NO: 38831 - protein, 10 aa, Artificial Sequence
  Description of Artificial Sequence: Synthetic epitope
QRSLALAEQK

SEQ ID NO: 38832 - protein, 10 aa, Artificial Sequence
  Description of Artificial Sequence: Synthetic epitope
QRSLQKEQLQ

SEQ ID NO: 38833 - protein, 10 aa, Artificial Sequence
  Description of Artificial Sequence: Synthetic epitope
QRSLVLNTEP

SEQ ID NO: 38834 - protein, 10 aa, Artificial Sequence
  Description of Artificial Sequence: Synthetic epitope
QRSMETAEEG

SEQ ID NO: 38835 - protein, 10 aa, Artificial Sequence
  Description of Artificial Sequence: Synthetic epitope
QRSPGSQGVR

SEQ ID NO: 38836 - protein, 10 aa, Artificial Sequence
  Description of Artificial Sequence: Synthetic epitope
QRSPNSETEE

SEQ ID NO: 38837 - protein, 10 aa, Artificial Sequence
  Description of Artificial Sequence: Synthetic epitope
QRSPVQALQP

SEQ ID NO: 38838 - protein, 10 aa, Artificial Sequence
  Description of Artificial Sequence: Synthetic epitope
QRSRDESASE

SEQ ID NO: 38839 - protein, 10 aa, Artificial Sequence
  Description of Artificial Sequence: Synthetic epitope
QRSRKKQTQK

SEQ ID NO: 38840 - protein, 10 aa, Artificial Sequence
  Description of Artificial Sequence: Synthetic epitope
QRSRREQFSR

SEQ ID NO: 38841 - protein, 10 aa, Artificial Sequence
  Description of Artificial Sequence: Synthetic epitope
QRSRTALSKG

SEQ ID NO: 38842 - protein, 10 aa, Artificial Sequence
  Description of Artificial Sequence: Synthetic epitope
QRSSIEVREA

SEQ ID NO: 38843 - protein, 10 aa, Artificial Sequence
  Description of Artificial Sequence: Synthetic epitope
QRSSIGKNRA

SEQ ID NO: 38844 - protein, 10 aa, Artificial Sequence
  Description of Artificial Sequence: Synthetic epitope
QRSSKHQNKM

SEQ ID NO: 38845 - protein, 10 aa, Artificial Sequence
  Description of Artificial Sequence: Synthetic epitope
QRSSTAMTVM

SEQ ID NO: 38846 - protein, 10 aa, Artificial Sequence
  Description of Artificial Sequence: Synthetic epitope
QRSSYVSMRI

SEQ ID NO: 38847 - protein, 10 aa, Artificial Sequence
  Description of Artificial Sequence: Synthetic epitope
QRSVEPMRLS

SEQ ID NO: 38848 - protein, 10 aa, Artificial Sequence
  Description of Artificial Sequence: Synthetic epitope
QRSVSEESAN

SEQ ID NO: 38849 - protein, 10 aa, Artificial Sequence
  Description of Artificial Sequence: Synthetic epitope
QRSYPFIRDE

SEQ ID NO: 38850 - protein, 10 aa, Artificial Sequence
  Description of Artificial Sequence: Synthetic epitope
QRTAGKTAAT

SEQ ID NO: 38851 - protein, 10 aa, Artificial Sequence
  Description of Artificial Sequence: Synthetic epitope
QRTAKYVANQ

SEQ ID NO: 38852 - protein, 10 aa, Artificial Sequence
  Description of Artificial Sequence: Synthetic epitope
QRTARAVSPQ

SEQ ID NO: 38853 - protein, 10 aa, Artificial Sequence
  Description of Artificial Sequence: Synthetic epitope
QRTEASRTHP

SEQ ID NO: 38854 - protein, 10 aa, Artificial Sequence
  Description of Artificial Sequence: Synthetic epitope
QRTEAVLTHK

SEQ ID NO: 38855 - protein, 10 aa, Artificial Sequence
  Description of Artificial Sequence: Synthetic epitope
QRTEESVISK

SEQ ID NO: 38856 - protein, 10 aa, Artificial Sequence
  Description of Artificial Sequence: Synthetic epitope
QRTEKKVLPS

SEQ ID NO: 38857 - protein, 10 aa, Artificial Sequence
  Description of Artificial Sequence: Synthetic epitope
QRTEVVGTQN

SEQ ID NO: 38858 - protein, 10 aa, Artificial Sequence
  Description of Artificial Sequence: Synthetic epitope
QRTFTTLSSV

SEQ ID NO: 38859 - protein, 10 aa, Artificial Sequence
  Description of Artificial Sequence: Synthetic epitope
QRTGDSKERG

SEQ ID NO: 38860 - protein, 10 aa, Artificial Sequence
  Description of Artificial Sequence: Synthetic epitope
QRTGTSRGSD

SEQ ID NO: 38861 - protein, 10 aa, Artificial Sequence
  Description of Artificial Sequence: Synthetic epitope
QRTKPQSFQV

SEQ ID NO: 38862 - protein, 10 aa, Artificial Sequence
  Description of Artificial Sequence: Synthetic epitope
QRTMLMDEQP

SEQ ID NO: 38863 - protein, 10 aa, Artificial Sequence
  Description of Artificial Sequence: Synthetic epitope
QRTNALTVQQ

SEQ ID NO: 38864 - protein, 10 aa, Artificial Sequence
  Description of Artificial Sequence: Synthetic epitope
QRTQAPAVAT

SEQ ID NO: 38865 - protein, 10 aa, Artificial Sequence
  Description of Artificial Sequence: Synthetic epitope
QRTQQDSTRT

SEQ ID NO: 38866 - protein, 10 aa, Artificial Sequence
  Description of Artificial Sequence: Synthetic epitope
QRTRANSMEG

SEQ ID NO: 38867 - protein, 10 aa, Artificial Sequence
  Description of Artificial Sequence: Synthetic epitope
QRTSAKMKRR

SEQ ID NO: 38868 - protein, 10 aa, Artificial Sequence
  Description of Artificial Sequence: Synthetic epitope
QRTSASKLGA

SEQ ID NO: 38869 - protein, 10 aa, Artificial Sequence
  Description of Artificial Sequence: Synthetic epitope
QRTSSAMSGH

SEQ ID NO: 38870 - protein, 10 aa, Artificial Sequence
  Description of Artificial Sequence: Synthetic epitope
QRTSTSDSEG

SEQ ID NO: 38871 - protein, 10 aa, Artificial Sequence
  Description of Artificial Sequence: Synthetic epitope
QRTSVALEKN

SEQ ID NO: 38872 - protein, 10 aa, Artificial Sequence
  Description of Artificial Sequence: Synthetic epitope
QRTSVSAAKE

SEQ ID NO: 38873 - protein, 10 aa, Artificial Sequence
  Description of Artificial Sequence: Synthetic epitope
QRTTIAAMET

SEQ ID NO: 38874 - protein, 10 aa, Artificial Sequence
  Description of Artificial Sequence: Synthetic epitope
QRTVATSGNM

SEQ ID NO: 38875 - protein, 10 aa, Artificial Sequence
  Description of Artificial Sequence: Synthetic epitope
QRTWHAWMDN

SEQ ID NO: 38876 - protein, 10 aa, Artificial Sequence
  Description of Artificial Sequence: Synthetic epitope
QRVASVMQEY

SEQ ID NO: 38877 - protein, 10 aa, Artificial Sequence
  Description of Artificial Sequence: Synthetic epitope
QRVEDQENEP

SEQ ID NO: 38878 - protein, 10 aa, Artificial Sequence
  Description of Artificial Sequence: Synthetic epitope
QRVGTVVEKH

SEQ ID NO: 38879 - protein, 10 aa, Artificial Sequence
  Description of Artificial Sequence: Synthetic epitope
QRVKEDARKK

SEQ ID NO: 38880 - protein, 10 aa, Artificial Sequence
  Description of Artificial Sequence: Synthetic epitope
QRVKSKIPAA

SEQ ID NO: 38881 - protein, 10 aa, Artificial Sequence
  Description of Artificial Sequence: Synthetic epitope
QRVLADLKVQ

SEQ ID NO: 38882 - protein, 10 aa, Artificial Sequence
  Description of Artificial Sequence: Synthetic epitope
QRVLSTAQFL

SEQ ID NO: 38883 - protein, 10 aa, Artificial Sequence
  Description of Artificial Sequence: Synthetic epitope
QRVLVEPDAG

SEQ ID NO: 38884 - protein, 10 aa, Artificial Sequence
  Description of Artificial Sequence: Synthetic epitope
QRVNKKVNND

SEQ ID NO: 38885 - protein, 10 aa, Artificial Sequence
  Description of Artificial Sequence: Synthetic epitope
QRVNSKSFKG

SEQ ID NO: 38886 - protein, 10 aa, Artificial Sequence
  Description of Artificial Sequence: Synthetic epitope
QRVQLKKLPK

SEQ ID NO: 38887 - protein, 10 aa, Artificial Sequence
  Description of Artificial Sequence: Synthetic epitope
QRVQSPQQIV

SEQ ID NO: 38888 - protein, 10 aa, Artificial Sequence
  Description of Artificial Sequence: Synthetic epitope
QRVQSVAGNS

SEQ ID NO: 38889 - protein, 10 aa, Artificial Sequence
  Description of Artificial Sequence: Synthetic epitope
QRVRKITVHD

SEQ ID NO: 38890 - protein, 10 aa, Artificial Sequence
  Description of Artificial Sequence: Synthetic epitope
QRVRYDSSNQ

SEQ ID NO: 38891 - protein, 10 aa, Artificial Sequence
  Description of Artificial Sequence: Synthetic epitope
QRVTEHILDE

SEQ ID NO: 38892 - protein, 10 aa, Artificial Sequence
  Description of Artificial Sequence: Synthetic epitope
QRVTIKKALT

SEQ ID NO: 38893 - protein, 10 aa, Artificial Sequence
  Description of Artificial Sequence: Synthetic epitope
QRVTRAINAK

SEQ ID NO: 38894 - protein, 10 aa, Artificial Sequence
  Description of Artificial Sequence: Synthetic epitope
QRWEMVMDKK

SEQ ID NO: 38895 - protein, 10 aa, Artificial Sequence
  Description of Artificial Sequence: Synthetic epitope
QRWENVEEPN

SEQ ID NO: 38896 - protein, 10 aa, Artificial Sequence
  Description of Artificial Sequence: Synthetic epitope
QRWIEAMEDA

SEQ ID NO: 38897 - protein, 10 aa, Artificial Sequence
  Description of Artificial Sequence: Synthetic epitope
QRWLAIDANA

SEQ ID NO: 38898 - protein, 10 aa, Artificial Sequence
  Description of Artificial Sequence: Synthetic epitope
QRWQVNPTVG

SEQ ID NO: 38899 - protein, 10 aa, Artificial Sequence
  Description of Artificial Sequence: Synthetic epitope
QRYSVSRWEV

SEQ ID NO: 38900 - protein, 10 aa, Artificial Sequence
  Description of Artificial Sequence: Synthetic epitope
QRYVEQSNLM

SEQ ID NO: 38901 - protein, 10 aa, Artificial Sequence
  Description of Artificial Sequence: Synthetic epitope
QSAAEAQTQP

SEQ ID NO: 38902 - protein, 10 aa, Artificial Sequence
  Description of Artificial Sequence: Synthetic epitope
QSAAKAPYLA

SEQ ID NO: 38903 - protein, 10 aa, Artificial Sequence
  Description of Artificial Sequence: Synthetic epitope
QSAAQKHQQT

SEQ ID NO: 38904 - protein, 10 aa, Artificial Sequence
  Description of Artificial Sequence: Synthetic epitope
QSADKQRALE

SEQ ID NO: 38905 - protein, 10 aa, Artificial Sequence
  Description of Artificial Sequence: Synthetic epitope
QSADLKTSSD

SEQ ID NO: 38906 - protein, 10 aa, Artificial Sequence
  Description of Artificial Sequence: Synthetic epitope
QSADSKTKEN

SEQ ID NO: 38907 - protein, 10 aa, Artificial Sequence
  Description of Artificial Sequence: Synthetic epitope
QSADSLNSIS

SEQ ID NO: 38908 - protein, 10 aa, Artificial Sequence
  Description of Artificial Sequence: Synthetic epitope
QSAEAKVSKS

SEQ ID NO: 38909 - protein, 10 aa, Artificial Sequence
  Description of Artificial Sequence: Synthetic epitope
QSAEEAKRAI

SEQ ID NO: 38910 - protein, 10 aa, Artificial Sequence
  Description of Artificial Sequence: Synthetic epitope
QSAEKAVDSS

SEQ ID NO: 38911 - protein, 10 aa, Artificial Sequence
  Description of Artificial Sequence: Synthetic epitope
QSAFTKSETI

SEQ ID NO: 38912 - protein, 10 aa, Artificial Sequence
  Description of Artificial Sequence: Synthetic epitope
QSAGGDAEGG

SEQ ID NO: 38913 - protein, 10 aa, Artificial Sequence
  Description of Artificial Sequence: Synthetic epitope
QSAGITASSV

SEQ ID NO: 38914 - protein, 10 aa, Artificial Sequence
  Description of Artificial Sequence: Synthetic epitope
QSAGQRESKS

SEQ ID NO: 38915 - protein, 10 aa, Artificial Sequence
  Description of Artificial Sequence: Synthetic epitope
QSAGRIQDQG

SEQ ID NO: 38916 - protein, 10 aa, Artificial Sequence
  Description of Artificial Sequence: Synthetic epitope
QSAHAAFNKA

SEQ ID NO: 38917 - protein, 10 aa, Artificial Sequence
  Description of Artificial Sequence: Synthetic epitope
QSAKYDMAED

SEQ ID NO: 38918 - protein, 10 aa, Artificial Sequence
  Description of Artificial Sequence: Synthetic epitope
QSALDQNKMH

SEQ ID NO: 38919 - protein, 10 aa, Artificial Sequence
  Description of Artificial Sequence: Synthetic epitope
QSALEQREFP

SEQ ID NO: 38920 - protein, 10 aa, Artificial Sequence
  Description of Artificial Sequence: Synthetic epitope
QSALKTFAVD

SEQ ID NO: 38921 - protein, 10 aa, Artificial Sequence
  Description of Artificial Sequence: Synthetic epitope
QSALPKINSH

SEQ ID NO: 38922 - protein, 10 aa, Artificial Sequence
  Description of Artificial Sequence: Synthetic epitope
QSAPKLSKRY

SEQ ID NO: 38923 - protein, 10 aa, Artificial Sequence
  Description of Artificial Sequence: Synthetic epitope
QSAPLSKVNG

SEQ ID NO: 38924 - protein, 10 aa, Artificial Sequence
  Description of Artificial Sequence: Synthetic epitope
QSAPSETASA

SEQ ID NO: 38925 - protein, 10 aa, Artificial Sequence
  Description of Artificial Sequence: Synthetic epitope
QSAQSSGSVG

SEQ ID NO: 38926 - protein, 10 aa, Artificial Sequence
  Description of Artificial Sequence: Synthetic epitope
QSAQVLLEKQ

SEQ ID NO: 38927 - protein, 10 aa, Artificial Sequence
  Description of Artificial Sequence: Synthetic epitope
QSARPSAKNS

SEQ ID NO: 38928 - protein, 10 aa, Artificial Sequence
  Description of Artificial Sequence: Synthetic epitope
QSASALEAHQ

SEQ ID NO: 38929 - protein, 10 aa, Artificial Sequence
  Description of Artificial Sequence: Synthetic epitope
QSASETSLVN

SEQ ID NO: 38930 - protein, 10 aa, Artificial Sequence
  Description of Artificial Sequence: Synthetic epitope
QSASKKWQQK

SEQ ID NO: 38931 - protein, 10 aa, Artificial Sequence
  Description of Artificial Sequence: Synthetic epitope
QSASRSNNWE

SEQ ID NO: 38932 - protein, 10 aa, Artificial Sequence
  Description of Artificial Sequence: Synthetic epitope
QSASTALMGE

SEQ ID NO: 38933 - protein, 10 aa, Artificial Sequence
  Description of Artificial Sequence: Synthetic epitope
QSATDVAAFL

SEQ ID NO: 38934 - protein, 10 aa, Artificial Sequence
  Description of Artificial Sequence: Synthetic epitope
QSATEQMAAT

SEQ ID NO: 38935 - protein, 10 aa, Artificial Sequence
  Description of Artificial Sequence: Synthetic epitope
QSATLNDKDD

SEQ ID NO: 38936 - protein, 10 aa, Artificial Sequence
  Description of Artificial Sequence: Synthetic epitope
QSATPTTIKV

SEQ ID NO: 38937 - protein, 10 aa, Artificial Sequence
  Description of Artificial Sequence: Synthetic epitope
QSATPVLQAQ

SEQ ID NO: 38938 - protein, 10 aa, Artificial Sequence
  Description of Artificial Sequence: Synthetic epitope
QSAVKSLKRP

SEQ ID NO: 38939 - protein, 10 aa, Artificial Sequence
  Description of Artificial Sequence: Synthetic epitope
QSAVTKVTAA

SEQ ID NO: 38940 - protein, 10 aa, Artificial Sequence
  Description of Artificial Sequence: Synthetic epitope
QSAYIRKKTR

SEQ ID NO: 38941 - protein, 10 aa, Artificial Sequence
  Description of Artificial Sequence: Synthetic epitope
QSDAGAVKSK

SEQ ID NO: 38942 - protein, 10 aa, Artificial Sequence
  Description of Artificial Sequence: Synthetic epitope
QSDDSSLRAS

SEQ ID NO: 38943 - protein, 10 aa, Artificial Sequence
  Description of Artificial Sequence: Synthetic epitope
QSDELALVRQ

SEQ ID NO: 38944 - protein, 10 aa, Artificial Sequence
  Description of Artificial Sequence: Synthetic epitope
QSDEREATDT

SEQ ID NO: 38945 - protein, 10 aa, Artificial Sequence
  Description of Artificial Sequence: Synthetic epitope
QSDKGVNGKK

SEQ ID NO: 38946 - protein, 10 aa, Artificial Sequence
  Description of Artificial Sequence: Synthetic epitope
QSDKKLTQEQ

SEQ ID NO: 38947 - protein, 10 aa, Artificial Sequence
  Description of Artificial Sequence: Synthetic epitope
QSDLGYVPAI

SEQ ID NO: 38948 - protein, 10 aa, Artificial Sequence
  Description of Artificial Sequence: Synthetic epitope
QSDLRALSLE

SEQ ID NO: 38949 - protein, 10 aa, Artificial Sequence
  Description of Artificial Sequence: Synthetic epitope
QSDQEAQAVA

SEQ ID NO: 38950 - protein, 10 aa, Artificial Sequence
  Description of Artificial Sequence: Synthetic epitope
QSDRSAQKGM

SEQ ID NO: 38951 - protein, 10 aa, Artificial Sequence
  Description of Artificial Sequence: Synthetic epitope
QSDRTEYNQK

SEQ ID NO: 38952 - protein, 10 aa, Artificial Sequence
  Description of Artificial Sequence: Synthetic epitope
QSDSISPKAT

SEQ ID NO: 38953 - protein, 10 aa, Artificial Sequence
  Description of Artificial Sequence: Synthetic epitope
QSDTKDRLGS

SEQ ID NO: 38954 - protein, 10 aa, Artificial Sequence
  Description of Artificial Sequence: Synthetic epitope
QSDTSSVKSE

SEQ ID NO: 38955 - protein, 10 aa, Artificial Sequence
  Description of Artificial Sequence: Synthetic epitope
QSDVTEAKSD

SEQ ID NO: 38956 - protein, 10 aa, Artificial Sequence
  Description of Artificial Sequence: Synthetic epitope
QSDYSAALKQ

SEQ ID NO: 38957 - protein, 10 aa, Artificial Sequence
  Description of Artificial Sequence: Synthetic epitope
QSEAELISDE

SEQ ID NO: 38958 - protein, 10 aa, Artificial Sequence
  Description of Artificial Sequence: Synthetic epitope
QSEDQEEIQE

SEQ ID NO: 38959 - protein, 10 aa, Artificial Sequence
  Description of Artificial Sequence: Synthetic epitope
QSEENISGMT

SEQ ID NO: 38960 - protein, 10 aa, Artificial Sequence
  Description of Artificial Sequence: Synthetic epitope
QSEEQSEASS

SEQ ID NO: 38961 - protein, 10 aa, Artificial Sequence
  Description of Artificial Sequence: Synthetic epitope
QSEERSDSDV

SEQ ID NO: 38962 - protein, 10 aa, Artificial Sequence
  Description of Artificial Sequence: Synthetic epitope
QSEEVRKKQE

SEQ ID NO: 38963 - protein, 10 aa, Artificial Sequence
  Description of Artificial Sequence: Synthetic epitope
QSEFIKEKSA

SEQ ID NO: 38964 - protein, 10 aa, Artificial Sequence
  Description of Artificial Sequence: Synthetic epitope
QSEINLSEVE

SEQ ID NO: 38965 - protein, 10 aa, Artificial Sequence
  Description of Artificial Sequence: Synthetic epitope
QSEINTLKRA

SEQ ID NO: 38966 - protein, 10 aa, Artificial Sequence
  Description of Artificial Sequence: Synthetic epitope
QSEISAAVER

SEQ ID NO: 38967 - protein, 10 aa, Artificial Sequence
  Description of Artificial Sequence: Synthetic epitope
QSEKDQYEEK

SEQ ID NO: 38968 - protein, 10 aa, Artificial Sequence
  Description of Artificial Sequence: Synthetic epitope
QSEKELESEG

SEQ ID NO: 38969 - protein, 10 aa, Artificial Sequence
  Description of Artificial Sequence: Synthetic epitope
QSEKKISKLD

SEQ ID NO: 38970 - protein, 10 aa, Artificial Sequence
  Description of Artificial Sequence: Synthetic epitope
QSEKKQETSW

SEQ ID NO: 38971 - protein, 10 aa, Artificial Sequence
  Description of Artificial Sequence: Synthetic epitope
QSEKKVSPTE

SEQ ID NO: 38972 - protein, 10 aa, Artificial Sequence
  Description of Artificial Sequence: Synthetic epitope
QSEKSLLQEM

SEQ ID NO: 38973 - protein, 10 aa, Artificial Sequence
  Description of Artificial Sequence: Synthetic epitope
QSELKEFEPS

SEQ ID NO: 38974 - protein, 10 aa, Artificial Sequence
  Description of Artificial Sequence: Synthetic epitope
QSELLHSMLF

SEQ ID NO: 38975 - protein, 10 aa, Artificial Sequence
  Description of Artificial Sequence: Synthetic epitope
QSELLNIESQ

SEQ ID NO: 38976 - protein, 10 aa, Artificial Sequence
  Description of Artificial Sequence: Synthetic epitope
QSELQFKDAE

SEQ ID NO: 38977 - protein, 10 aa, Artificial Sequence
  Description of Artificial Sequence: Synthetic epitope
QSELSAKMRE

SEQ ID NO: 38978 - protein, 10 aa, Artificial Sequence
  Description of Artificial Sequence: Synthetic epitope
QSELTASASA

SEQ ID NO: 38979 - protein, 10 aa, Artificial Sequence
  Description of Artificial Sequence: Synthetic epitope
QSELTELRTT

SEQ ID NO: 38980 - protein, 10 aa, Artificial Sequence
  Description of Artificial Sequence: Synthetic epitope
QSELVDLYIQ

SEQ ID NO: 38981 - protein, 10 aa, Artificial Sequence
  Description of Artificial Sequence: Synthetic epitope
QSEMEAQVLQ

SEQ ID NO: 38982 - protein, 10 aa, Artificial Sequence
  Description of Artificial Sequence: Synthetic epitope
QSEQMNHISD

SEQ ID NO: 38983 - protein, 10 aa, Artificial Sequence
  Description of Artificial Sequence: Synthetic epitope
QSEQQESVDA

SEQ ID NO: 38984 - protein, 10 aa, Artificial Sequence
  Description of Artificial Sequence: Synthetic epitope
QSEQQTNIEQ

SEQ ID NO: 38985 - protein, 10 aa, Artificial Sequence
  Description of Artificial Sequence: Synthetic epitope
QSEQVSEAEL

SEQ ID NO: 38986 - protein, 10 aa, Artificial Sequence
  Description of Artificial Sequence: Synthetic epitope
QSERAASAKL

SEQ ID NO: 38987 - protein, 10 aa, Artificial Sequence
  Description of Artificial Sequence: Synthetic epitope
QSERQSQDSS

SEQ ID NO: 38988 - protein, 10 aa, Artificial Sequence
  Description of Artificial Sequence: Synthetic epitope
QSERYGYKEV

SEQ ID NO: 38989 - protein, 10 aa, Artificial Sequence
  Description of Artificial Sequence: Synthetic epitope
QSESLLTKND

SEQ ID NO: 38990 - protein, 10 aa, Artificial Sequence
  Description of Artificial Sequence: Synthetic epitope
QSESSAFKAD

SEQ ID NO: 38991 - protein, 10 aa, Artificial Sequence
  Description of Artificial Sequence: Synthetic epitope
QSESSDEVTE

SEQ ID NO: 38992 - protein, 10 aa, Artificial Sequence
  Description of Artificial Sequence: Synthetic epitope
QSETATTPAK

SEQ ID NO: 38993 - protein, 10 aa, Artificial Sequence
  Description of Artificial Sequence: Synthetic epitope
QSETEKLTSH

SEQ ID NO: 38994 - protein, 10 aa, Artificial Sequence
  Description of Artificial Sequence: Synthetic epitope
QSETKSIDTE

SEQ ID NO: 38995 - protein, 10 aa, Artificial Sequence
  Description of Artificial Sequence: Synthetic epitope
QSEVEERNAM

SEQ ID NO: 38996 - protein, 10 aa, Artificial Sequence
  Description of Artificial Sequence: Synthetic epitope
QSEVKAVTAR

SEQ ID NO: 38997 - protein, 10 aa, Artificial Sequence
  Description of Artificial Sequence: Synthetic epitope
QSEVQISSRK

SEQ ID NO: 38998 - protein, 10 aa, Artificial Sequence
  Description of Artificial Sequence: Synthetic epitope
QSEVVTLVSP

SEQ ID NO: 38999 - protein, 10 aa, Artificial Sequence
  Description of Artificial Sequence: Synthetic epitope
QSFAKDDTIG

SEQ ID NO: 39000 - protein, 10 aa, Artificial Sequence
  Description of Artificial Sequence: Synthetic epitope
QSFASARPYL

SEQ ID NO: 39001 - protein, 10 aa, Artificial Sequence
  Description of Artificial Sequence: Synthetic epitope
QSFFTKMAKK

SEQ ID NO: 39002 - protein, 10 aa, Artificial Sequence
  Description of Artificial Sequence: Synthetic epitope
QSFGRLSLQP

SEQ ID NO: 39003 - protein, 10 aa, Artificial Sequence
  Description of Artificial Sequence: Synthetic epitope
QSFQKTTEFD

SEQ ID NO: 39004 - protein, 10 aa, Artificial Sequence
  Description of Artificial Sequence: Synthetic epitope
QSFSKAARLK

SEQ ID NO: 39005 - protein, 10 aa, Artificial Sequence
  Description of Artificial Sequence: Synthetic epitope
QSFSNVDDRS

SEQ ID NO: 39006 - protein, 10 aa, Artificial Sequence
  Description of Artificial Sequence: Synthetic epitope
QSFSTSKPPA

SEQ ID NO: 39007 - protein, 10 aa, Artificial Sequence
  Description of Artificial Sequence: Synthetic epitope
QSFVKEQLEE

SEQ ID NO: 39008 - protein, 10 aa, Artificial Sequence
  Description of Artificial Sequence: Synthetic epitope
QSGADQSDLA

SEQ ID NO: 39009 - protein, 10 aa, Artificial Sequence
  Description of Artificial Sequence: Synthetic epitope
QSGALDASRQ

SEQ ID NO: 39010 - protein, 10 aa, Artificial Sequence
  Description of Artificial Sequence: Synthetic epitope
QSGFEAMSQE

SEQ ID NO: 39011 - protein, 10 aa, Artificial Sequence
  Description of Artificial Sequence: Synthetic epitope
QSGFVKLTNE

SEQ ID NO: 39012 - protein, 10 aa, Artificial Sequence
  Description of Artificial Sequence: Synthetic epitope
QSGKVQDNIR

SEQ ID NO: 39013 - protein, 10 aa, Artificial Sequence
  Description of Artificial Sequence: Synthetic epitope
QSGLNRDVGS

SEQ ID NO: 39014 - protein, 10 aa, Artificial Sequence
  Description of Artificial Sequence: Synthetic epitope
QSGLSRELFE

SEQ ID NO: 39015 - protein, 10 aa, Artificial Sequence
  Description of Artificial Sequence: Synthetic epitope
QSGMVQLQAL

SEQ ID NO: 39016 - protein, 10 aa, Artificial Sequence
  Description of Artificial Sequence: Synthetic epitope
QSGNKRNHEP

SEQ ID NO: 39017 - protein, 10 aa, Artificial Sequence
  Description of Artificial Sequence: Synthetic epitope
QSGPSAELEA

SEQ ID NO: 39018 - protein, 10 aa, Artificial Sequence
  Description of Artificial Sequence: Synthetic epitope
QSGQMLRLLV

SEQ ID NO: 39019 - protein, 10 aa, Artificial Sequence
  Description of Artificial Sequence: Synthetic epitope
QSGRHVSHLD

SEQ ID NO: 39020 - protein, 10 aa, Artificial Sequence
  Description of Artificial Sequence: Synthetic epitope
QSGRHVSHLD

SEQ ID NO: 39021 - protein, 10 aa, Artificial Sequence
  Description of Artificial Sequence: Synthetic epitope
QSGVDAANSA

SEQ ID NO: 39022 - protein, 10 aa, Artificial Sequence
  Description of Artificial Sequence: Synthetic epitope
QSHAEISPPA

SEQ ID NO: 39023 - protein, 10 aa, Artificial Sequence
  Description of Artificial Sequence: Synthetic epitope
QSHEKTQIRD

SEQ ID NO: 39024 - protein, 10 aa, Artificial Sequence
  Description of Artificial Sequence: Synthetic epitope
QSHESKLGEE

SEQ ID NO: 39025 - protein, 10 aa, Artificial Sequence
  Description of Artificial Sequence: Synthetic epitope
QSHFAMMHGG

SEQ ID NO: 39026 - protein, 10 aa, Artificial Sequence
  Description of Artificial Sequence: Synthetic epitope
QSHMQAHKKN

SEQ ID NO: 39027 - protein, 10 aa, Artificial Sequence
  Description of Artificial Sequence: Synthetic epitope
QSHSLHKSQF

SEQ ID NO: 39028 - protein, 10 aa, Artificial Sequence
  Description of Artificial Sequence: Synthetic epitope
QSHSLVSSQD

SEQ ID NO: 39029 - protein, 10 aa, Artificial Sequence
  Description of Artificial Sequence: Synthetic epitope
QSIAIELSDL

SEQ ID NO: 39030 - protein, 10 aa, Artificial Sequence
  Description of Artificial Sequence: Synthetic epitope
QSIDEIDIGT

SEQ ID NO: 39031 - protein, 10 aa, Artificial Sequence
  Description of Artificial Sequence: Synthetic epitope
QSIEFTQIEM

SEQ ID NO: 39032 - protein, 10 aa, Artificial Sequence
  Description of Artificial Sequence: Synthetic epitope
QSIEGVISKK

SEQ ID NO: 39033 - protein, 10 aa, Artificial Sequence
  Description of Artificial Sequence: Synthetic epitope
QSIELESEIE

SEQ ID NO: 39034 - protein, 10 aa, Artificial Sequence
  Description of Artificial Sequence: Synthetic epitope
QSIELLKSRP

SEQ ID NO: 39035 - protein, 10 aa, Artificial Sequence
  Description of Artificial Sequence: Synthetic epitope
QSIKLLSSTK

SEQ ID NO: 39036 - protein, 10 aa, Artificial Sequence
  Description of Artificial Sequence: Synthetic epitope
QSIKVRISLK

SEQ ID NO: 39037 - protein, 10 aa, Artificial Sequence
  Description of Artificial Sequence: Synthetic epitope
QSILIKFKEG

SEQ ID NO: 39038 - protein, 10 aa, Artificial Sequence
  Description of Artificial Sequence: Synthetic epitope
QSILISTSAT

SEQ ID NO: 39039 - protein, 10 aa, Artificial Sequence
  Description of Artificial Sequence: Synthetic epitope
QSILRTRQER

SEQ ID NO: 39040 - protein, 10 aa, Artificial Sequence
  Description of Artificial Sequence: Synthetic epitope
QSILTQRVHW

SEQ ID NO: 39041 - protein, 10 aa, Artificial Sequence
  Description of Artificial Sequence: Synthetic epitope
QSIMMQVLDK

SEQ ID NO: 39042 - protein, 10 aa, Artificial Sequence
  Description of Artificial Sequence: Synthetic epitope
QSINQSKKTV

SEQ ID NO: 39043 - protein, 10 aa, Artificial Sequence
  Description of Artificial Sequence: Synthetic epitope
QSIPEALKAG

SEQ ID NO: 39044 - protein, 10 aa, Artificial Sequence
  Description of Artificial Sequence: Synthetic epitope
QSIQDIIAKK

SEQ ID NO: 39045 - protein, 10 aa, Artificial Sequence
  Description of Artificial Sequence: Synthetic epitope
QSIQKYIKSH

SEQ ID NO: 39046 - protein, 10 aa, Artificial Sequence
  Description of Artificial Sequence: Synthetic epitope
QSIQLASQKH

SEQ ID NO: 39047 - protein, 10 aa, Artificial Sequence
  Description of Artificial Sequence: Synthetic epitope
QSIQVELEAE

SEQ ID NO: 39048 - protein, 10 aa, Artificial Sequence
  Description of Artificial Sequence: Synthetic epitope
QSISAEVESG

SEQ ID NO: 39049 - protein, 10 aa, Artificial Sequence
  Description of Artificial Sequence: Synthetic epitope
QSISPMRSIS

SEQ ID NO: 39050 - protein, 10 aa, Artificial Sequence
  Description of Artificial Sequence: Synthetic epitope
QSIVMYKSLF

SEQ ID NO: 39051 - protein, 10 aa, Artificial Sequence
  Description of Artificial Sequence: Synthetic epitope
QSIVSPSSTT

SEQ ID NO: 39052 - protein, 10 aa, Artificial Sequence
  Description of Artificial Sequence: Synthetic epitope
QSIWTNFSSR

SEQ ID NO: 39053 - protein, 10 aa, Artificial Sequence
  Description of Artificial Sequence: Synthetic epitope
QSIYKTIESK

SEQ ID NO: 39054 - protein, 10 aa, Artificial Sequence
  Description of Artificial Sequence: Synthetic epitope
QSKAGISRES

SEQ ID NO: 39055 - protein, 10 aa, Artificial Sequence
  Description of Artificial Sequence: Synthetic epitope
QSKALVSNLI

SEQ ID NO: 39056 - protein, 10 aa, Artificial Sequence
  Description of Artificial Sequence: Synthetic epitope
QSKEKLVELR

SEQ ID NO: 39057 - protein, 10 aa, Artificial Sequence
  Description of Artificial Sequence: Synthetic epitope
QSKEMTVEAE

SEQ ID NO: 39058 - protein, 10 aa, Artificial Sequence
  Description of Artificial Sequence: Synthetic epitope
QSKGRYTANL

SEQ ID NO: 39059 - protein, 10 aa, Artificial Sequence
  Description of Artificial Sequence: Synthetic epitope
QSKHPMANIT

SEQ ID NO: 39060 - protein, 10 aa, Artificial Sequence
  Description of Artificial Sequence: Synthetic epitope
QSKIEDHLDE

SEQ ID NO: 39061 - protein, 10 aa, Artificial Sequence
  Description of Artificial Sequence: Synthetic epitope
QSKIKENRQQ

SEQ ID NO: 39062 - protein, 10 aa, Artificial Sequence
  Description of Artificial Sequence: Synthetic epitope
QSKISIANPN

SEQ ID NO: 39063 - protein, 10 aa, Artificial Sequence
  Description of Artificial Sequence: Synthetic epitope
QSKISLISEK

SEQ ID NO: 39064 - protein, 10 aa, Artificial Sequence
  Description of Artificial Sequence: Synthetic epitope
QSKKLQVQVK

SEQ ID NO: 39065 - protein, 10 aa, Artificial Sequence
  Description of Artificial Sequence: Synthetic epitope
QSKKLRKSLI

SEQ ID NO: 39066 - protein, 10 aa, Artificial Sequence
  Description of Artificial Sequence: Synthetic epitope
QSKKQNSLGS

SEQ ID NO: 39067 - protein, 10 aa, Artificial Sequence
  Description of Artificial Sequence: Synthetic epitope
QSKKRLHIED

SEQ ID NO: 39068 - protein, 10 aa, Artificial Sequence
  Description of Artificial Sequence: Synthetic epitope
QSKKRSSAQT

SEQ ID NO: 39069 - protein, 10 aa, Artificial Sequence
  Description of Artificial Sequence: Synthetic epitope
QSKKVGTYKN

SEQ ID NO: 39070 - protein, 10 aa, Artificial Sequence
  Description of Artificial Sequence: Synthetic epitope
QSKLMYFEND

SEQ ID NO: 39071 - protein, 10 aa, Artificial Sequence
  Description of Artificial Sequence: Synthetic epitope
QSKMAAGTST

SEQ ID NO: 39072 - protein, 10 aa, Artificial Sequence
  Description of Artificial Sequence: Synthetic epitope
QSKMAHSRTS

SEQ ID NO: 39073 - protein, 10 aa, Artificial Sequence
  Description of Artificial Sequence: Synthetic epitope
QSKMASKAKK

SEQ ID NO: 39074 - protein, 10 aa, Artificial Sequence
  Description of Artificial Sequence: Synthetic epitope
QSKMEKAEDK

SEQ ID NO: 39075 - protein, 10 aa, Artificial Sequence
  Description of Artificial Sequence: Synthetic epitope
QSKPDRSAEE

SEQ ID NO: 39076 - protein, 10 aa, Artificial Sequence
  Description of Artificial Sequence: Synthetic epitope
QSKPLKKRKG

SEQ ID NO: 39077 - protein, 10 aa, Artificial Sequence
  Description of Artificial Sequence: Synthetic epitope
QSKQEETVES

SEQ ID NO: 39078 - protein, 10 aa, Artificial Sequence
  Description of Artificial Sequence: Synthetic epitope
QSKQENLDID

SEQ ID NO: 39079 - protein, 10 aa, Artificial Sequence
  Description of Artificial Sequence: Synthetic epitope
QSKRKAPTLT

SEQ ID NO: 39080 - protein, 10 aa, Artificial Sequence
  Description of Artificial Sequence: Synthetic epitope
QSKRVSQKED

SEQ ID NO: 39081 - protein, 10 aa, Artificial Sequence
  Description of Artificial Sequence: Synthetic epitope
QSKSESEEDD

SEQ ID NO: 39082 - protein, 10 aa, Artificial Sequence
  Description of Artificial Sequence: Synthetic epitope
QSKTASDKSP

SEQ ID NO: 39083 - protein, 10 aa, Artificial Sequence
  Description of Artificial Sequence: Synthetic epitope
QSKTQSIDPK

SEQ ID NO: 39084 - protein, 10 aa, Artificial Sequence
  Description of Artificial Sequence: Synthetic epitope
QSKTSTSTQK

SEQ ID NO: 39085 - protein, 10 aa, Artificial Sequence
  Description of Artificial Sequence: Synthetic epitope
QSKVVKTRKF

SEQ ID NO: 39086 - protein, 10 aa, Artificial Sequence
  Description of Artificial Sequence: Synthetic epitope
QSKVVNNSPQ

SEQ ID NO: 39087 - protein, 10 aa, Artificial Sequence
  Description of Artificial Sequence: Synthetic epitope
QSKVVPLDNI

SEQ ID NO: 39088 - protein, 10 aa, Artificial Sequence
  Description of Artificial Sequence: Synthetic epitope
QSLADSLDSD

SEQ ID NO: 39089 - protein, 10 aa, Artificial Sequence
  Description of Artificial Sequence: Synthetic epitope
QSLANFPSDA

SEQ ID NO: 39090 - protein, 10 aa, Artificial Sequence
  Description of Artificial Sequence: Synthetic epitope
QSLASLLSES

SEQ ID NO: 39091 - protein, 10 aa, Artificial Sequence
  Description of Artificial Sequence: Synthetic epitope
QSLASQSASI

SEQ ID NO: 39092 - protein, 10 aa, Artificial Sequence
  Description of Artificial Sequence: Synthetic epitope
QSLASSNSAQ

SEQ ID NO: 39093 - protein, 10 aa, Artificial Sequence
  Description of Artificial Sequence: Synthetic epitope
QSLATRDDIS

SEQ ID NO: 39094 - protein, 10 aa, Artificial Sequence
  Description of Artificial Sequence: Synthetic epitope
QSLDEMSQTI

SEQ ID NO: 39095 - protein, 10 aa, Artificial Sequence
  Description of Artificial Sequence: Synthetic epitope
QSLEALAVRS

SEQ ID NO: 39096 - protein, 10 aa, Artificial Sequence
  Description of Artificial Sequence: Synthetic epitope
QSLEDTAKRS

SEQ ID NO: 39097 - protein, 10 aa, Artificial Sequence
  Description of Artificial Sequence: Synthetic epitope
QSLEIEESGD

SEQ ID NO: 39098 - protein, 10 aa, Artificial Sequence
  Description of Artificial Sequence: Synthetic epitope
QSLEKYTKVK

SEQ ID NO: 39099 - protein, 10 aa, Artificial Sequence
  Description of Artificial Sequence: Synthetic epitope
QSLEQQLEEA

SEQ ID NO: 39100 - protein, 10 aa, Artificial Sequence
  Description of Artificial Sequence: Synthetic epitope
QSLGESNAQM

SEQ ID NO: 39101 - protein, 10 aa, Artificial Sequence
  Description of Artificial Sequence: Synthetic epitope
QSLHQQVLNK

SEQ ID NO: 39102 - protein, 10 aa, Artificial Sequence
  Description of Artificial Sequence: Synthetic epitope
QSLINNEIPD

SEQ ID NO: 39103 - protein, 10 aa, Artificial Sequence
  Description of Artificial Sequence: Synthetic epitope
QSLKALIENA

SEQ ID NO: 39104 - protein, 10 aa, Artificial Sequence
  Description of Artificial Sequence: Synthetic epitope
QSLKDTKTTV

SEQ ID NO: 39105 - protein, 10 aa, Artificial Sequence
  Description of Artificial Sequence: Synthetic epitope
QSLKETLVEP

SEQ ID NO: 39106 - protein, 10 aa, Artificial Sequence
  Description of Artificial Sequence: Synthetic epitope
QSLKKAMSSL

SEQ ID NO: 39107 - protein, 10 aa, Artificial Sequence
  Description of Artificial Sequence: Synthetic epitope
QSLLKASSKD

SEQ ID NO: 39108 - protein, 10 aa, Artificial Sequence
  Description of Artificial Sequence: Synthetic epitope
QSLLKATGID

SEQ ID NO: 39109 - protein, 10 aa, Artificial Sequence
  Description of Artificial Sequence: Synthetic epitope
QSLLKVQATG

SEQ ID NO: 39110 - protein, 10 aa, Artificial Sequence
  Description of Artificial Sequence: Synthetic epitope
QSLLNESDGK

SEQ ID NO: 39111 - protein, 10 aa, Artificial Sequence
  Description of Artificial Sequence: Synthetic epitope
QSLLQSQSSG

SEQ ID NO: 39112 - protein, 10 aa, Artificial Sequence
  Description of Artificial Sequence: Synthetic epitope
QSLLSEELRR

SEQ ID NO: 39113 - protein, 10 aa, Artificial Sequence
  Description of Artificial Sequence: Synthetic epitope
QSLLSSLEAQ

SEQ ID NO: 39114 - protein, 10 aa, Artificial Sequence
  Description of Artificial Sequence: Synthetic epitope
QSLLSSTVAK

SEQ ID NO: 39115 - protein, 10 aa, Artificial Sequence
  Description of Artificial Sequence: Synthetic epitope
QSLLSSVESA

SEQ ID NO: 39116 - protein, 10 aa, Artificial Sequence
  Description of Artificial Sequence: Synthetic epitope
QSLLSTDREA

SEQ ID NO: 39117 - protein, 10 aa, Artificial Sequence
  Description of Artificial Sequence: Synthetic epitope
QSLLTAIRSG

SEQ ID NO: 39118 - protein, 10 aa, Artificial Sequence
  Description of Artificial Sequence: Synthetic epitope
QSLMASNPAV

SEQ ID NO: 39119 - protein, 10 aa, Artificial Sequence
  Description of Artificial Sequence: Synthetic epitope
QSLNMSLQNQ

SEQ ID NO: 39120 - protein, 10 aa, Artificial Sequence
  Description of Artificial Sequence: Synthetic epitope
QSLNNSQAKF

SEQ ID NO: 39121 - protein, 10 aa, Artificial Sequence
  Description of Artificial Sequence: Synthetic epitope
QSLNSNSVSQ

SEQ ID NO: 39122 - protein, 10 aa, Artificial Sequence
  Description of Artificial Sequence: Synthetic epitope
QSLNTNMHTQ

SEQ ID NO: 39123 - protein, 10 aa, Artificial Sequence
  Description of Artificial Sequence: Synthetic epitope
QSLPMQWLHR

SEQ ID NO: 39124 - protein, 10 aa, Artificial Sequence
  Description of Artificial Sequence: Synthetic epitope
QSLQYATSQD

SEQ ID NO: 39125 - protein, 10 aa, Artificial Sequence
  Description of Artificial Sequence: Synthetic epitope
QSLREALELP

SEQ ID NO: 39126 - protein, 10 aa, Artificial Sequence
  Description of Artificial Sequence: Synthetic epitope
QSLREQRSQG

SEQ ID NO: 39127 - protein, 10 aa, Artificial Sequence
  Description of Artificial Sequence: Synthetic epitope
QSLRGSLSSN

SEQ ID NO: 39128 - protein, 10 aa, Artificial Sequence
  Description of Artificial Sequence: Synthetic epitope
QSLRPPAGQA

SEQ ID NO: 39129 - protein, 10 aa, Artificial Sequence
  Description of Artificial Sequence: Synthetic epitope
QSLRQRKSVN

SEQ ID NO: 39130 - protein, 10 aa, Artificial Sequence
  Description of Artificial Sequence: Synthetic epitope
QSLRSDAYDH

SEQ ID NO: 39131 - protein, 10 aa, Artificial Sequence
  Description of Artificial Sequence: Synthetic epitope
QSLRSQLQLY

SEQ ID NO: 39132 - protein, 10 aa, Artificial Sequence
  Description of Artificial Sequence: Synthetic epitope
QSLSKILDVA

SEQ ID NO: 39133 - protein, 10 aa, Artificial Sequence
  Description of Artificial Sequence: Synthetic epitope
QSLSKKRKAL

SEQ ID NO: 39134 - protein, 10 aa, Artificial Sequence
  Description of Artificial Sequence: Synthetic epitope
QSLSQQAPKT

SEQ ID NO: 39135 - protein, 10 aa, Artificial Sequence
  Description of Artificial Sequence: Synthetic epitope
QSLSSADNLE

SEQ ID NO: 39136 - protein, 10 aa, Artificial Sequence
  Description of Artificial Sequence: Synthetic epitope
QSLSSGAVAT

SEQ ID NO: 39137 - protein, 10 aa, Artificial Sequence
  Description of Artificial Sequence: Synthetic epitope
QSLSVSQVHV

SEQ ID NO: 39138 - protein, 10 aa, Artificial Sequence
  Description of Artificial Sequence: Synthetic epitope
QSLTELLMAQ

SEQ ID NO: 39139 - protein, 10 aa, Artificial Sequence
  Description of Artificial Sequence: Synthetic epitope
QSLTLFLQTK

SEQ ID NO: 39140 - protein, 10 aa, Artificial Sequence
  Description of Artificial Sequence: Synthetic epitope
QSLTSQIRHR

SEQ ID NO: 39141 - protein, 10 aa, Artificial Sequence
  Description of Artificial Sequence: Synthetic epitope
QSLTSVHSIK

SEQ ID NO: 39142 - protein, 10 aa, Artificial Sequence
  Description of Artificial Sequence: Synthetic epitope
QSLVALQFQK

SEQ ID NO: 39143 - protein, 10 aa, Artificial Sequence
  Description of Artificial Sequence: Synthetic epitope
QSLVYSDGNT

SEQ ID NO: 39144 - protein, 10 aa, Artificial Sequence
  Description of Artificial Sequence: Synthetic epitope
QSLYAKAKEL

SEQ ID NO: 39145 - protein, 10 aa, Artificial Sequence
  Description of Artificial Sequence: Synthetic epitope
QSMDTMKQVY

SEQ ID NO: 39146 - protein, 10 aa, Artificial Sequence
  Description of Artificial Sequence: Synthetic epitope
QSMEAEELEQ

SEQ ID NO: 39147 - protein, 10 aa, Artificial Sequence
  Description of Artificial Sequence: Synthetic epitope
QSMHASSASK

SEQ ID NO: 39148 - protein, 10 aa, Artificial Sequence
  Description of Artificial Sequence: Synthetic epitope
QSMISSRRGD

SEQ ID NO: 39149 - protein, 10 aa, Artificial Sequence
  Description of Artificial Sequence: Synthetic epitope
QSMITYNSDQ

SEQ ID NO: 39150 - protein, 10 aa, Artificial Sequence
  Description of Artificial Sequence: Synthetic epitope
QSMKAEKRSI

SEQ ID NO: 39151 - protein, 10 aa, Artificial Sequence
  Description of Artificial Sequence: Synthetic epitope
QSMKAYKQDR

SEQ ID NO: 39152 - protein, 10 aa, Artificial Sequence
  Description of Artificial Sequence: Synthetic epitope
QSMPDTEESR

SEQ ID NO: 39153 - protein, 10 aa, Artificial Sequence
  Description of Artificial Sequence: Synthetic epitope
QSMQASTQMQ

SEQ ID NO: 39154 - protein, 10 aa, Artificial Sequence
  Description of Artificial Sequence: Synthetic epitope
QSMQKSSLEF

SEQ ID NO: 39155 - protein, 10 aa, Artificial Sequence
  Description of Artificial Sequence: Synthetic epitope
QSMVTDKPSD

SEQ ID NO: 39156 - protein, 10 aa, Artificial Sequence
  Description of Artificial Sequence: Synthetic epitope
QSNAALLMKG

SEQ ID NO: 39157 - protein, 10 aa, Artificial Sequence
  Description of Artificial Sequence: Synthetic epitope
QSNAPIIPQG

SEQ ID NO: 39158 - protein, 10 aa, Artificial Sequence
  Description of Artificial Sequence: Synthetic epitope
QSNDDIASRA

SEQ ID NO: 39159 - protein, 10 aa, Artificial Sequence
  Description of Artificial Sequence: Synthetic epitope
QSNENLSDSQ

SEQ ID NO: 39160 - protein, 10 aa, Artificial Sequence
  Description of Artificial Sequence: Synthetic epitope
QSNISEINHQ

SEQ ID NO: 39161 - protein, 10 aa, Artificial Sequence
  Description of Artificial Sequence: Synthetic epitope
QSNIVLLTQA

SEQ ID NO: 39162 - protein, 10 aa, Artificial Sequence
  Description of Artificial Sequence: Synthetic epitope
QSNKLSLTAA

SEQ ID NO: 39163 - protein, 10 aa, Artificial Sequence
  Description of Artificial Sequence: Synthetic epitope
QSNLELLTQA

SEQ ID NO: 39164 - protein, 10 aa, Artificial Sequence
  Description of Artificial Sequence: Synthetic epitope
QSNLKSGITT

SEQ ID NO: 39165 - protein, 10 aa, Artificial Sequence
  Description of Artificial Sequence: Synthetic epitope
QSNMTQKVEE

SEQ ID NO: 39166 - protein, 10 aa, Artificial Sequence
  Description of Artificial Sequence: Synthetic epitope
QSNSDSTYED

SEQ ID NO: 39167 - protein, 10 aa, Artificial Sequence
  Description of Artificial Sequence: Synthetic epitope
QSNSFHAKRA

SEQ ID NO: 39168 - protein, 10 aa, Artificial Sequence
  Description of Artificial Sequence: Synthetic epitope
QSNSKVSELD

SEQ ID NO: 39169 - protein, 10 aa, Artificial Sequence
  Description of Artificial Sequence: Synthetic epitope
QSNSTPTPPE

SEQ ID NO: 39170 - protein, 10 aa, Artificial Sequence
  Description of Artificial Sequence: Synthetic epitope
QSNVSNETST

SEQ ID NO: 39171 - protein, 10 aa, Artificial Sequence
  Description of Artificial Sequence: Synthetic epitope
QSNYKSTDQE

SEQ ID NO: 39172 - protein, 10 aa, Artificial Sequence
  Description of Artificial Sequence: Synthetic epitope
QSPGAIYAAS

SEQ ID NO: 39173 - protein, 10 aa, Artificial Sequence
  Description of Artificial Sequence: Synthetic epitope
QSPGVSMMSP

SEQ ID NO: 39174 - protein, 10 aa, Artificial Sequence
  Description of Artificial Sequence: Synthetic epitope
QSPISNYSNS

SEQ ID NO: 39175 - protein, 10 aa, Artificial Sequence
  Description of Artificial Sequence: Synthetic epitope
QSPKEKASKT

SEQ ID NO: 39176 - protein, 10 aa, Artificial Sequence
  Description of Artificial Sequence: Synthetic epitope
QSPKKTKISP

SEQ ID NO: 39177 - protein, 10 aa, Artificial Sequence
  Description of Artificial Sequence: Synthetic epitope
QSPLSILLTL

SEQ ID NO: 39178 - protein, 10 aa, Artificial Sequence
  Description of Artificial Sequence: Synthetic epitope
QSPMQPVDQA

SEQ ID NO: 39179 - protein, 10 aa, Artificial Sequence
  Description of Artificial Sequence: Synthetic epitope
QSPQVEEIMQ

SEQ ID NO: 39180 - protein, 10 aa, Artificial Sequence
  Description of Artificial Sequence: Synthetic epitope
QSPRTTQATH

SEQ ID NO: 39181 - protein, 10 aa, Artificial Sequence
  Description of Artificial Sequence: Synthetic epitope
QSPSALQQVT

SEQ ID NO: 39182 - protein, 10 aa, Artificial Sequence
  Description of Artificial Sequence: Synthetic epitope
QSPSANVLPT

SEQ ID NO: 39183 - protein, 10 aa, Artificial Sequence
  Description of Artificial Sequence: Synthetic epitope
QSPSSFSTAK

SEQ ID NO: 39184 - protein, 10 aa, Artificial Sequence
  Description of Artificial Sequence: Synthetic epitope
QSQAQLSEGS

SEQ ID NO: 39185 - protein, 10 aa, Artificial Sequence
  Description of Artificial Sequence: Synthetic epitope
QSQASEIEKN

SEQ ID NO: 39186 - protein, 10 aa, Artificial Sequence
  Description of Artificial Sequence: Synthetic epitope
QSQASLQSAS

SEQ ID NO: 39187 - protein, 10 aa, Artificial Sequence
  Description of Artificial Sequence: Synthetic epitope
QSQDALVLED

SEQ ID NO: 39188 - protein, 10 aa, Artificial Sequence
  Description of Artificial Sequence: Synthetic epitope
QSQEASNHSS

SEQ ID NO: 39189 - protein, 10 aa, Artificial Sequence
  Description of Artificial Sequence: Synthetic epitope
QSQEETKERR

SEQ ID NO: 39190 - protein, 10 aa, Artificial Sequence
  Description of Artificial Sequence: Synthetic epitope
QSQGKSVSNV

SEQ ID NO: 39191 - protein, 10 aa, Artificial Sequence
  Description of Artificial Sequence: Synthetic epitope
QSQGLLSQLQ

SEQ ID NO: 39192 - protein, 10 aa, Artificial Sequence
  Description of Artificial Sequence: Synthetic epitope
QSQKKMGEIA

SEQ ID NO: 39193 - protein, 10 aa, Artificial Sequence
  Description of Artificial Sequence: Synthetic epitope
QSQKLTGSLG

SEQ ID NO: 39194 - protein, 10 aa, Artificial Sequence
  Description of Artificial Sequence: Synthetic epitope
QSQKQNEDYE

SEQ ID NO: 39195 - protein, 10 aa, Artificial Sequence
  Description of Artificial Sequence: Synthetic epitope
QSQLELQEVR

SEQ ID NO: 39196 - protein, 10 aa, Artificial Sequence
  Description of Artificial Sequence: Synthetic epitope
QSQLQNKESE

SEQ ID NO: 39197 - protein, 10 aa, Artificial Sequence
  Description of Artificial Sequence: Synthetic epitope
QSQLSVPEIE

SEQ ID NO: 39198 - protein, 10 aa, Artificial Sequence
  Description of Artificial Sequence: Synthetic epitope
QSQPVSNNEE

SEQ ID NO: 39199 - protein, 10 aa, Artificial Sequence
  Description of Artificial Sequence: Synthetic epitope
QSQQAQAREA

SEQ ID NO: 39200 - protein, 10 aa, Artificial Sequence
  Description of Artificial Sequence: Synthetic epitope
QSQQASEFLP

SEQ ID NO: 39201 - protein, 10 aa, Artificial Sequence
  Description of Artificial Sequence: Synthetic epitope
QSQQDFLAEA

SEQ ID NO: 39202 - protein, 10 aa, Artificial Sequence
  Description of Artificial Sequence: Synthetic epitope
QSQQEAAKKH

SEQ ID NO: 39203 - protein, 10 aa, Artificial Sequence
  Description of Artificial Sequence: Synthetic epitope
QSQQLKDSEL

SEQ ID NO: 39204 - protein, 10 aa, Artificial Sequence
  Description of Artificial Sequence: Synthetic epitope
QSQQRWKAAN

SEQ ID NO: 39205 - protein, 10 aa, Artificial Sequence
  Description of Artificial Sequence: Synthetic epitope
QSQQSQPVEL

SEQ ID NO: 39206 - protein, 10 aa, Artificial Sequence
  Description of Artificial Sequence: Synthetic epitope
QSQRESSELQ

SEQ ID NO: 39207 - protein, 10 aa, Artificial Sequence
  Description of Artificial Sequence: Synthetic epitope
QSQRKALGRK

SEQ ID NO: 39208 - protein, 10 aa, Artificial Sequence
  Description of Artificial Sequence: Synthetic epitope
QSQRSVSPTF

SEQ ID NO: 39209 - protein, 10 aa, Artificial Sequence
  Description of Artificial Sequence: Synthetic epitope
QSQSHTLAIR

SEQ ID NO: 39210 - protein, 10 aa, Artificial Sequence
  Description of Artificial Sequence: Synthetic epitope
QSQSQTLGLQ

SEQ ID NO: 39211 - protein, 10 aa, Artificial Sequence
  Description of Artificial Sequence: Synthetic epitope
QSQSVEVIES

SEQ ID NO: 39212 - protein, 10 aa, Artificial Sequence
  Description of Artificial Sequence: Synthetic epitope
QSQTAIKHAN

SEQ ID NO: 39213 - protein, 10 aa, Artificial Sequence
  Description of Artificial Sequence: Synthetic epitope
QSQVELSNDQ

SEQ ID NO: 39214 - protein, 10 aa, Artificial Sequence
  Description of Artificial Sequence: Synthetic epitope
QSQVSKKQQA

SEQ ID NO: 39215 - protein, 10 aa, Artificial Sequence
  Description of Artificial Sequence: Synthetic epitope
QSRADSRAKA

SEQ ID NO: 39216 - protein, 10 aa, Artificial Sequence
  Description of Artificial Sequence: Synthetic epitope
QSRALSTANE

SEQ ID NO: 39217 - protein, 10 aa, Artificial Sequence
  Description of Artificial Sequence: Synthetic epitope
QSRAMGLMKQ

SEQ ID NO: 39218 - protein, 10 aa, Artificial Sequence
  Description of Artificial Sequence: Synthetic epitope
QSRASDKQTL

SEQ ID NO: 39219 - protein, 10 aa, Artificial Sequence
  Description of Artificial Sequence: Synthetic epitope
QSRDRIQLQY

SEQ ID NO: 39220 - protein, 10 aa, Artificial Sequence
  Description of Artificial Sequence: Synthetic epitope
QSRGKQIDVK

SEQ ID NO: 39221 - protein, 10 aa, Artificial Sequence
  Description of Artificial Sequence: Synthetic epitope
QSRINTGRRK

SEQ ID NO: 39222 - protein, 10 aa, Artificial Sequence
  Description of Artificial Sequence: Synthetic epitope
QSRISEISME

SEQ ID NO: 39223 - protein, 10 aa, Artificial Sequence
  Description of Artificial Sequence: Synthetic epitope
QSRKEQVNIE

SEQ ID NO: 39224 - protein, 10 aa, Artificial Sequence
  Description of Artificial Sequence: Synthetic epitope
QSRLARTSFD

SEQ ID NO: 39225 - protein, 10 aa, Artificial Sequence
  Description of Artificial Sequence: Synthetic epitope
QSRLSASETS

SEQ ID NO: 39226 - protein, 10 aa, Artificial Sequence
  Description of Artificial Sequence: Synthetic epitope
QSRLSGRLAQ

SEQ ID NO: 39227 - protein, 10 aa, Artificial Sequence
  Description of Artificial Sequence: Synthetic epitope
QSRLTDAKRI

SEQ ID NO: 39228 - protein, 10 aa, Artificial Sequence
  Description of Artificial Sequence: Synthetic epitope
QSRNAKTMTT

SEQ ID NO: 39229 - protein, 10 aa, Artificial Sequence
  Description of Artificial Sequence: Synthetic epitope
QSRNRSTQSQ

SEQ ID NO: 39230 - protein, 10 aa, Artificial Sequence
  Description of Artificial Sequence: Synthetic epitope
QSRPEFAALD

SEQ ID NO: 39231 - protein, 10 aa, Artificial Sequence
  Description of Artificial Sequence: Synthetic epitope
QSRQEQDRST

SEQ ID NO: 39232 - protein, 10 aa, Artificial Sequence
  Description of Artificial Sequence: Synthetic epitope
QSRQTEKASI

SEQ ID NO: 39233 - protein, 10 aa, Artificial Sequence
  Description of Artificial Sequence: Synthetic epitope
QSRSSLNAKP

SEQ ID NO: 39234 - protein, 10 aa, Artificial Sequence
  Description of Artificial Sequence: Synthetic epitope
QSRTSIVQAA

SEQ ID NO: 39235 - protein, 10 aa, Artificial Sequence
  Description of Artificial Sequence: Synthetic epitope
QSRTTMTAIS

SEQ ID NO: 39236 - protein, 10 aa, Artificial Sequence
  Description of Artificial Sequence: Synthetic epitope
QSRTTSWRTS

SEQ ID NO: 39237 - protein, 10 aa, Artificial Sequence
  Description of Artificial Sequence: Synthetic epitope
QSRVMNVHKM

SEQ ID NO: 39238 - protein, 10 aa, Artificial Sequence
  Description of Artificial Sequence: Synthetic epitope
QSSADDLTPS

SEQ ID NO: 39239 - protein, 10 aa, Artificial Sequence
  Description of Artificial Sequence: Synthetic epitope
QSSADDLTPS

SEQ ID NO: 39240 - protein, 10 aa, Artificial Sequence
  Description of Artificial Sequence: Synthetic epitope
QSSAFESLEE

SEQ ID NO: 39241 - protein, 10 aa, Artificial Sequence
  Description of Artificial Sequence: Synthetic epitope
QSSAKMTKTS

SEQ ID NO: 39242 - protein, 10 aa, Artificial Sequence
  Description of Artificial Sequence: Synthetic epitope
QSSAMLATKA

SEQ ID NO: 39243 - protein, 10 aa, Artificial Sequence
  Description of Artificial Sequence: Synthetic epitope
QSSAMVPSME

SEQ ID NO: 39244 - protein, 10 aa, Artificial Sequence
  Description of Artificial Sequence: Synthetic epitope
QSSASRKTQK

SEQ ID NO: 39245 - protein, 10 aa, Artificial Sequence
  Description of Artificial Sequence: Synthetic epitope
QSSASVQNHE

SEQ ID NO: 39246 - protein, 10 aa, Artificial Sequence
  Description of Artificial Sequence: Synthetic epitope
QSSDEIANRA

SEQ ID NO: 39247 - protein, 10 aa, Artificial Sequence
  Description of Artificial Sequence: Synthetic epitope
QSSDKVTSIS

SEQ ID NO: 39248 - protein, 10 aa, Artificial Sequence
  Description of Artificial Sequence: Synthetic epitope
QSSDLQQSQV

SEQ ID NO: 39249 - protein, 10 aa, Artificial Sequence
  Description of Artificial Sequence: Synthetic epitope
QSSDPATEST

SEQ ID NO: 39250 - protein, 10 aa, Artificial Sequence
  Description of Artificial Sequence: Synthetic epitope
QSSDTEQQSP

SEQ ID NO: 39251 - protein, 10 aa, Artificial Sequence
  Description of Artificial Sequence: Synthetic epitope
QSSDTTAKAL

SEQ ID NO: 39252 - protein, 10 aa, Artificial Sequence
  Description of Artificial Sequence: Synthetic epitope
QSSEASGSLT

SEQ ID NO: 39253 - protein, 10 aa, Artificial Sequence
  Description of Artificial Sequence: Synthetic epitope
QSSEISTKSK

SEQ ID NO: 39254 - protein, 10 aa, Artificial Sequence
  Description of Artificial Sequence: Synthetic epitope
QSSELEGTPE

SEQ ID NO: 39255 - protein, 10 aa, Artificial Sequence
  Description of Artificial Sequence: Synthetic epitope
QSSELVDSVQ

SEQ ID NO: 39256 - protein, 10 aa, Artificial Sequence
  Description of Artificial Sequence: Synthetic epitope
QSSEMIATNT

SEQ ID NO: 39257 - protein, 10 aa, Artificial Sequence
  Description of Artificial Sequence: Synthetic epitope
QSSETRVQGL

SEQ ID NO: 39258 - protein, 10 aa, Artificial Sequence
  Description of Artificial Sequence: Synthetic epitope
QSSETSAKGL

SEQ ID NO: 39259 - protein, 10 aa, Artificial Sequence
  Description of Artificial Sequence: Synthetic epitope
QSSEVILDYS

SEQ ID NO: 39260 - protein, 10 aa, Artificial Sequence
  Description of Artificial Sequence: Synthetic epitope
QSSGKTRARP

SEQ ID NO: 39261 - protein, 10 aa, Artificial Sequence
  Description of Artificial Sequence: Synthetic epitope
QSSGLAVIAS

SEQ ID NO: 39262 - protein, 10 aa, Artificial Sequence
  Description of Artificial Sequence: Synthetic epitope
QSSGRSQSKG

SEQ ID NO: 39263 - protein, 10 aa, Artificial Sequence
  Description of Artificial Sequence: Synthetic epitope
QSSIKQLEIR

SEQ ID NO: 39264 - protein, 10 aa, Artificial Sequence
  Description of Artificial Sequence: Synthetic epitope
QSSINSADGY

SEQ ID NO: 39265 - protein, 10 aa, Artificial Sequence
  Description of Artificial Sequence: Synthetic epitope
QSSKEEVNSE

SEQ ID NO: 39266 - protein, 10 aa, Artificial Sequence
  Description of Artificial Sequence: Synthetic epitope
QSSKERATTN

SEQ ID NO: 39267 - protein, 10 aa, Artificial Sequence
  Description of Artificial Sequence: Synthetic epitope
QSSKQKKAIQ

SEQ ID NO: 39268 - protein, 10 aa, Artificial Sequence
  Description of Artificial Sequence: Synthetic epitope
QSSKQQLPAI

SEQ ID NO: 39269 - protein, 10 aa, Artificial Sequence
  Description of Artificial Sequence: Synthetic epitope
QSSKSGKIYL

SEQ ID NO: 39270 - protein, 10 aa, Artificial Sequence
  Description of Artificial Sequence: Synthetic epitope
QSSKSVKEAW

SEQ ID NO: 39271 - protein, 10 aa, Artificial Sequence
  Description of Artificial Sequence: Synthetic epitope
QSSLKYEDLA

SEQ ID NO: 39272 - protein, 10 aa, Artificial Sequence
  Description of Artificial Sequence: Synthetic epitope
QSSLRSLISA

SEQ ID NO: 39273 - protein, 10 aa, Artificial Sequence
  Description of Artificial Sequence: Synthetic epitope
QSSLSQPSVV

SEQ ID NO: 39274 - protein, 10 aa, Artificial Sequence
  Description of Artificial Sequence: Synthetic epitope
QSSLTFIKPL

SEQ ID NO: 39275 - protein, 10 aa, Artificial Sequence
  Description of Artificial Sequence: Synthetic epitope
QSSMAQLPME

SEQ ID NO: 39276 - protein, 10 aa, Artificial Sequence
  Description of Artificial Sequence: Synthetic epitope
QSSMEANQQG

SEQ ID NO: 39277 - protein, 10 aa, Artificial Sequence
  Description of Artificial Sequence: Synthetic epitope
QSSMSVEEQR

SEQ ID NO: 39278 - protein, 10 aa, Artificial Sequence
  Description of Artificial Sequence: Synthetic epitope
QSSNASVNQG

SEQ ID NO: 39279 - protein, 10 aa, Artificial Sequence
  Description of Artificial Sequence: Synthetic epitope
QSSNSTTENN

SEQ ID NO: 39280 - protein, 10 aa, Artificial Sequence
  Description of Artificial Sequence: Synthetic epitope
QSSNVLADSD

SEQ ID NO: 39281 - protein, 10 aa, Artificial Sequence
  Description of Artificial Sequence: Synthetic epitope
QSSPDLSSEE

SEQ ID NO: 39282 - protein, 10 aa, Artificial Sequence
  Description of Artificial Sequence: Synthetic epitope
QSSPESTQSP

SEQ ID NO: 39283 - protein, 10 aa, Artificial Sequence
  Description of Artificial Sequence: Synthetic epitope
QSSPLSEPSR

SEQ ID NO: 39284 - protein, 10 aa, Artificial Sequence
  Description of Artificial Sequence: Synthetic epitope
QSSPLVNKEE

SEQ ID NO: 39285 - protein, 10 aa, Artificial Sequence
  Description of Artificial Sequence: Synthetic epitope
QSSRSGTVSQ

SEQ ID NO: 39286 - protein, 10 aa, Artificial Sequence
  Description of Artificial Sequence: Synthetic epitope
QSSTAQSLED

SEQ ID NO: 39287 - protein, 10 aa, Artificial Sequence
  Description of Artificial Sequence: Synthetic epitope
QSSTDEEITF

SEQ ID NO: 39288 - protein, 10 aa, Artificial Sequence
  Description of Artificial Sequence: Synthetic epitope
QSSTEKLIRP

SEQ ID NO: 39289 - protein, 10 aa, Artificial Sequence
  Description of Artificial Sequence: Synthetic epitope
QSSTEVSSTN

SEQ ID NO: 39290 - protein, 10 aa, Artificial Sequence
  Description of Artificial Sequence: Synthetic epitope
QSSTGDLSSI

SEQ ID NO: 39291 - protein, 10 aa, Artificial Sequence
  Description of Artificial Sequence: Synthetic epitope
QSSTRRAYQQ

SEQ ID NO: 39292 - protein, 10 aa, Artificial Sequence
  Description of Artificial Sequence: Synthetic epitope
QSSTSYSINT

SEQ ID NO: 39293 - protein, 10 aa, Artificial Sequence
  Description of Artificial Sequence: Synthetic epitope
QSSVATITRL

SEQ ID NO: 39294 - protein, 10 aa, Artificial Sequence
  Description of Artificial Sequence: Synthetic epitope
QSSVLSENQR

SEQ ID NO: 39295 - protein, 10 aa, Artificial Sequence
  Description of Artificial Sequence: Synthetic epitope
QSSVNGLIQE

SEQ ID NO: 39296 - protein, 10 aa, Artificial Sequence
  Description of Artificial Sequence: Synthetic epitope
QSSVNVIVKE

SEQ ID NO: 39297 - protein, 10 aa, Artificial Sequence
  Description of Artificial Sequence: Synthetic epitope
QSSVQQYEEK

SEQ ID NO: 39298 - protein, 10 aa, Artificial Sequence
  Description of Artificial Sequence: Synthetic epitope
QSSVQSLGSV

SEQ ID NO: 39299 - protein, 10 aa, Artificial Sequence
  Description of Artificial Sequence: Synthetic epitope
QSSVTNASSG

SEQ ID NO: 39300 - protein, 10 aa, Artificial Sequence
  Description of Artificial Sequence: Synthetic epitope
QSSVTQVTEQ

SEQ ID NO: 39301 - protein, 10 aa, Artificial Sequence
  Description of Artificial Sequence: Synthetic epitope
QSTAKKSGQK

SEQ ID NO: 39302 - protein, 10 aa, Artificial Sequence
  Description of Artificial Sequence: Synthetic epitope
QSTASTPTEK

SEQ ID NO: 39303 - protein, 10 aa, Artificial Sequence
  Description of Artificial Sequence: Synthetic epitope
QSTATQSNVE

SEQ ID NO: 39304 - protein, 10 aa, Artificial Sequence
  Description of Artificial Sequence: Synthetic epitope
QSTESESQAP

SEQ ID NO: 39305 - protein, 10 aa, Artificial Sequence
  Description of Artificial Sequence: Synthetic epitope
QSTESKLHLQ

SEQ ID NO: 39306 - protein, 10 aa, Artificial Sequence
  Description of Artificial Sequence: Synthetic epitope
QSTESVSSQQ

SEQ ID NO: 39307 - protein, 10 aa, Artificial Sequence
  Description of Artificial Sequence: Synthetic epitope
QSTEVKHVTK

SEQ ID NO: 39308 - protein, 10 aa, Artificial Sequence
  Description of Artificial Sequence: Synthetic epitope
QSTFSSQLLN

SEQ ID NO: 39309 - protein, 10 aa, Artificial Sequence
  Description of Artificial Sequence: Synthetic epitope
QSTGNQMSSR

SEQ ID NO: 39310 - protein, 10 aa, Artificial Sequence
  Description of Artificial Sequence: Synthetic epitope
QSTGSLKSTS

SEQ ID NO: 39311 - protein, 10 aa, Artificial Sequence
  Description of Artificial Sequence: Synthetic epitope
QSTGSSDDSA

SEQ ID NO: 39312 - protein, 10 aa, Artificial Sequence
  Description of Artificial Sequence: Synthetic epitope
QSTILQEVQV

SEQ ID NO: 39313 - protein, 10 aa, Artificial Sequence
  Description of Artificial Sequence: Synthetic epitope
QSTKFVLQAA

SEQ ID NO: 39314 - protein, 10 aa, Artificial Sequence
  Description of Artificial Sequence: Synthetic epitope
QSTKLSVVHE

SEQ ID NO: 39315 - protein, 10 aa, Artificial Sequence
  Description of Artificial Sequence: Synthetic epitope
QSTKPSLMIQ

SEQ ID NO: 39316 - protein, 10 aa, Artificial Sequence
  Description of Artificial Sequence: Synthetic epitope
QSTKVNLLYS

SEQ ID NO: 39317 - protein, 10 aa, Artificial Sequence
  Description of Artificial Sequence: Synthetic epitope
QSTLALSDSQ

SEQ ID NO: 39318 - protein, 10 aa, Artificial Sequence
  Description of Artificial Sequence: Synthetic epitope
QSTLKLSTLH

SEQ ID NO: 39319 - protein, 10 aa, Artificial Sequence
  Description of Artificial Sequence: Synthetic epitope
QSTNTHTQSS

SEQ ID NO: 39320 - protein, 10 aa, Artificial Sequence
  Description of Artificial Sequence: Synthetic epitope
QSTPKSAKGS

SEQ ID NO: 39321 - protein, 10 aa, Artificial Sequence
  Description of Artificial Sequence: Synthetic epitope
QSTPQAANSP

SEQ ID NO: 39322 - protein, 10 aa, Artificial Sequence
  Description of Artificial Sequence: Synthetic epitope
QSTPSETQTV

SEQ ID NO: 39323 - protein, 10 aa, Artificial Sequence
  Description of Artificial Sequence: Synthetic epitope
QSTPTVREEK

SEQ ID NO: 39324 - protein, 10 aa, Artificial Sequence
  Description of Artificial Sequence: Synthetic epitope
QSTQGSEGTT

SEQ ID NO: 39325 - protein, 10 aa, Artificial Sequence
  Description of Artificial Sequence: Synthetic epitope
QSTQISQELE

SEQ ID NO: 39326 - protein, 10 aa, Artificial Sequence
  Description of Artificial Sequence: Synthetic epitope
QSTQLSLQVS

SEQ ID NO: 39327 - protein, 10 aa, Artificial Sequence
  Description of Artificial Sequence: Synthetic epitope
QSTQRFFSEQ

SEQ ID NO: 39328 - protein, 10 aa, Artificial Sequence
  Description of Artificial Sequence: Synthetic epitope
QSTQSGSSTT

SEQ ID NO: 39329 - protein, 10 aa, Artificial Sequence
  Description of Artificial Sequence: Synthetic epitope
QSTQTTNTSN

SEQ ID NO: 39330 - protein, 10 aa, Artificial Sequence
  Description of Artificial Sequence: Synthetic epitope
QSTSNSEQQA

SEQ ID NO: 39331 - protein, 10 aa, Artificial Sequence
  Description of Artificial Sequence: Synthetic epitope
QSTSPDTSLG

SEQ ID NO: 39332 - protein, 10 aa, Artificial Sequence
  Description of Artificial Sequence: Synthetic epitope
QSTSVEKEKE

SEQ ID NO: 39333 - protein, 10 aa, Artificial Sequence
  Description of Artificial Sequence: Synthetic epitope
QSTSVSTKKE

SEQ ID NO: 39334 - protein, 10 aa, Artificial Sequence
  Description of Artificial Sequence: Synthetic epitope
QSTTDYNQVV

SEQ ID NO: 39335 - protein, 10 aa, Artificial Sequence
  Description of Artificial Sequence: Synthetic epitope
QSTTSSKSEN

SEQ ID NO: 39336 - protein, 10 aa, Artificial Sequence
  Description of Artificial Sequence: Synthetic epitope
QSTVLAPVID

SEQ ID NO: 39337 - protein, 10 aa, Artificial Sequence
  Description of Artificial Sequence: Synthetic epitope
QSTVSGAGSF

SEQ ID NO: 39338 - protein, 10 aa, Artificial Sequence
  Description of Artificial Sequence: Synthetic epitope
QSTWLEFKAK

SEQ ID NO: 39339 - protein, 10 aa, Artificial Sequence
  Description of Artificial Sequence: Synthetic epitope
QSVFQGQKTE

SEQ ID NO: 39340 - protein, 10 aa, Artificial Sequence
  Description of Artificial Sequence: Synthetic epitope
QSVIDSQGKS

SEQ ID NO: 39341 - protein, 10 aa, Artificial Sequence
  Description of Artificial Sequence: Synthetic epitope
QSVITTSAPN

SEQ ID NO: 39342 - protein, 10 aa, Artificial Sequence
  Description of Artificial Sequence: Synthetic epitope
QSVKKPSKPV

SEQ ID NO: 39343 - protein, 10 aa, Artificial Sequence
  Description of Artificial Sequence: Synthetic epitope
QSVLESDSVR

SEQ ID NO: 39344 - protein, 10 aa, Artificial Sequence
  Description of Artificial Sequence: Synthetic epitope
QSVLNKGESQ

SEQ ID NO: 39345 - protein, 10 aa, Artificial Sequence
  Description of Artificial Sequence: Synthetic epitope
QSVLSKRTLQ

SEQ ID NO: 39346 - protein, 10 aa, Artificial Sequence
  Description of Artificial Sequence: Synthetic epitope
QSVNMDSDQF

SEQ ID NO: 39347 - protein, 10 aa, Artificial Sequence
  Description of Artificial Sequence: Synthetic epitope
QSVPQETAEG

SEQ ID NO: 39348 - protein, 10 aa, Artificial Sequence
  Description of Artificial Sequence: Synthetic epitope
QSVPRMMQDA

SEQ ID NO: 39349 - protein, 10 aa, Artificial Sequence
  Description of Artificial Sequence: Synthetic epitope
QSVQDNALQR

SEQ ID NO: 39350 - protein, 10 aa, Artificial Sequence
  Description of Artificial Sequence: Synthetic epitope
QSVQELIPDS

SEQ ID NO: 39351 - protein, 10 aa, Artificial Sequence
  Description of Artificial Sequence: Synthetic epitope
QSVQEQSARS

SEQ ID NO: 39352 - protein, 10 aa, Artificial Sequence
  Description of Artificial Sequence: Synthetic epitope
QSVQKVIISD

SEQ ID NO: 39353 - protein, 10 aa, Artificial Sequence
  Description of Artificial Sequence: Synthetic epitope
QSVQQRKLDL

SEQ ID NO: 39354 - protein, 10 aa, Artificial Sequence
  Description of Artificial Sequence: Synthetic epitope
QSVRRHTNST

SEQ ID NO: 39355 - protein, 10 aa, Artificial Sequence
  Description of Artificial Sequence: Synthetic epitope
QSVSEVVRGS

SEQ ID NO: 39356 - protein, 10 aa, Artificial Sequence
  Description of Artificial Sequence: Synthetic epitope
QSVSRLQSIV

SEQ ID NO: 39357 - protein, 10 aa, Artificial Sequence
  Description of Artificial Sequence: Synthetic epitope
QSVTLRISTE

SEQ ID NO: 39358 - protein, 10 aa, Artificial Sequence
  Description of Artificial Sequence: Synthetic epitope
QSVTSFPDAD

SEQ ID NO: 39359 - protein, 10 aa, Artificial Sequence
  Description of Artificial Sequence: Synthetic epitope
QSVVEVMEDS

SEQ ID NO: 39360 - protein, 10 aa, Artificial Sequence
  Description of Artificial Sequence: Synthetic epitope
QSVVLTSNFA

SEQ ID NO: 39361 - protein, 10 aa, Artificial Sequence
  Description of Artificial Sequence: Synthetic epitope
QSVVQSGRSE

SEQ ID NO: 39362 - protein, 10 aa, Artificial Sequence
  Description of Artificial Sequence: Synthetic epitope
QSVVTTSELS

SEQ ID NO: 39363 - protein, 10 aa, Artificial Sequence
  Description of Artificial Sequence: Synthetic epitope
QSVYDSVLQK

SEQ ID NO: 39364 - protein, 10 aa, Artificial Sequence
  Description of Artificial Sequence: Synthetic epitope
QSWDRAGRGS

SEQ ID NO: 39365 - protein, 10 aa, Artificial Sequence
  Description of Artificial Sequence: Synthetic epitope
QSWEKAIRQA

SEQ ID NO: 39366 - protein, 10 aa, Artificial Sequence
  Description of Artificial Sequence: Synthetic epitope
QSWFDTHEFK

SEQ ID NO: 39367 - protein, 10 aa, Artificial Sequence
  Description of Artificial Sequence: Synthetic epitope
QSWKTKDSKQ

SEQ ID NO: 39368 - protein, 10 aa, Artificial Sequence
  Description of Artificial Sequence: Synthetic epitope
QSWSTKTPTV

SEQ ID NO: 39369 - protein, 10 aa, Artificial Sequence
  Description of Artificial Sequence: Synthetic epitope
QSYAYSKSLS

SEQ ID NO: 39370 - protein, 10 aa, Artificial Sequence
  Description of Artificial Sequence: Synthetic epitope
QSYEPKSLKS

SEQ ID NO: 39371 - protein, 10 aa, Artificial Sequence
  Description of Artificial Sequence: Synthetic epitope
QSYEQNETKL

SEQ ID NO: 39372 - protein, 10 aa, Artificial Sequence
  Description of Artificial Sequence: Synthetic epitope
QSYKRDSVLR

SEQ ID NO: 39373 - protein, 10 aa, Artificial Sequence
  Description of Artificial Sequence: Synthetic epitope
QSYKRKSEQE

SEQ ID NO: 39374 - protein, 10 aa, Artificial Sequence
  Description of Artificial Sequence: Synthetic epitope
QSYLILTAPL

SEQ ID NO: 39375 - protein, 10 aa, Artificial Sequence
  Description of Artificial Sequence: Synthetic epitope
QSYLSHSQSY

SEQ ID NO: 39376 - protein, 10 aa, Artificial Sequence
  Description of Artificial Sequence: Synthetic epitope
QSYLYIDWTD

SEQ ID NO: 39377 - protein, 10 aa, Artificial Sequence
  Description of Artificial Sequence: Synthetic epitope
QSYNSSAEQV

SEQ ID NO: 39378 - protein, 10 aa, Artificial Sequence
  Description of Artificial Sequence: Synthetic epitope
QSYSQVISRG

SEQ ID NO: 39379 - protein, 10 aa, Artificial Sequence
  Description of Artificial Sequence: Synthetic epitope
QSYTATVISA

SEQ ID NO: 39380 - protein, 10 aa, Artificial Sequence
  Description of Artificial Sequence: Synthetic epitope
QSYVKARPYL

SEQ ID NO: 39381 - protein, 10 aa, Artificial Sequence
  Description of Artificial Sequence: Synthetic epitope
QTAAFWQMDG

SEQ ID NO: 39382 - protein, 10 aa, Artificial Sequence
  Description of Artificial Sequence: Synthetic epitope
QTAAQLILKA

SEQ ID NO: 39383 - protein, 10 aa, Artificial Sequence
  Description of Artificial Sequence: Synthetic epitope
QTAAQVTLKA

SEQ ID NO: 39384 - protein, 10 aa, Artificial Sequence
  Description of Artificial Sequence: Synthetic epitope
QTAARILASP

SEQ ID NO: 39385 - protein, 10 aa, Artificial Sequence
  Description of Artificial Sequence: Synthetic epitope
QTAEDAKLEK

SEQ ID NO: 39386 - protein, 10 aa, Artificial Sequence
  Description of Artificial Sequence: Synthetic epitope
QTAEFKLSAV

SEQ ID NO: 39387 - protein, 10 aa, Artificial Sequence
  Description of Artificial Sequence: Synthetic epitope
QTAEQQELED

SEQ ID NO: 39388 - protein, 10 aa, Artificial Sequence
  Description of Artificial Sequence: Synthetic epitope
QTAGLSLQRM

SEQ ID NO: 39389 - protein, 10 aa, Artificial Sequence
  Description of Artificial Sequence: Synthetic epitope
QTAGNVMSNE

SEQ ID NO: 39390 - protein, 10 aa, Artificial Sequence
  Description of Artificial Sequence: Synthetic epitope
QTAHDVADQP

SEQ ID NO: 39391 - protein, 10 aa, Artificial Sequence
  Description of Artificial Sequence: Synthetic epitope
QTAISVVEED

SEQ ID NO: 39392 - protein, 10 aa, Artificial Sequence
  Description of Artificial Sequence: Synthetic epitope
QTAKIQSGPQ

SEQ ID NO: 39393 - protein, 10 aa, Artificial Sequence
  Description of Artificial Sequence: Synthetic epitope
QTAKNLLKEE

SEQ ID NO: 39394 - protein, 10 aa, Artificial Sequence
  Description of Artificial Sequence: Synthetic epitope
QTALKAAQQH

SEQ ID NO: 39395 - protein, 10 aa, Artificial Sequence
  Description of Artificial Sequence: Synthetic epitope
QTANLTNQGK

SEQ ID NO: 39396 - protein, 10 aa, Artificial Sequence
  Description of Artificial Sequence: Synthetic epitope
QTANLTNQGK

SEQ ID NO: 39397 - protein, 10 aa, Artificial Sequence
  Description of Artificial Sequence: Synthetic epitope
QTANSRNGKK

SEQ ID NO: 39398 - protein, 10 aa, Artificial Sequence
  Description of Artificial Sequence: Synthetic epitope
QTAQLIVGHV

SEQ ID NO: 39399 - protein, 10 aa, Artificial Sequence
  Description of Artificial Sequence: Synthetic epitope
QTARLVFREE

SEQ ID NO: 39400 - protein, 10 aa, Artificial Sequence
  Description of Artificial Sequence: Synthetic epitope
QTASLKRGSS

SEQ ID NO: 39401 - protein, 10 aa, Artificial Sequence
  Description of Artificial Sequence: Synthetic epitope
QTASQLSLLQ

SEQ ID NO: 39402 - protein, 10 aa, Artificial Sequence
  Description of Artificial Sequence: Synthetic epitope
QTASRSSIIT

SEQ ID NO: 39403 - protein, 10 aa, Artificial Sequence
  Description of Artificial Sequence: Synthetic epitope
QTASSDSEDV

SEQ ID NO: 39404 - protein, 10 aa, Artificial Sequence
  Description of Artificial Sequence: Synthetic epitope
QTASSIVEAS

SEQ ID NO: 39405 - protein, 10 aa, Artificial Sequence
  Description of Artificial Sequence: Synthetic epitope
QTASYERLDV

SEQ ID NO: 39406 - protein, 10 aa, Artificial Sequence
  Description of Artificial Sequence: Synthetic epitope
QTAVKVPTTP

SEQ ID NO: 39407 - protein, 10 aa, Artificial Sequence
  Description of Artificial Sequence: Synthetic epitope
QTAVLTASAP

SEQ ID NO: 39408 - protein, 10 aa, Artificial Sequence
  Description of Artificial Sequence: Synthetic epitope
QTAVQTAQAA

SEQ ID NO: 39409 - protein, 10 aa, Artificial Sequence
  Description of Artificial Sequence: Synthetic epitope
QTAVTNNTAA

SEQ ID NO: 39410 - protein, 10 aa, Artificial Sequence
  Description of Artificial Sequence: Synthetic epitope
QTAVTQQVSQ

SEQ ID NO: 39411 - protein, 10 aa, Artificial Sequence
  Description of Artificial Sequence: Synthetic epitope
QTAVVGTTKE

SEQ ID NO: 39412 - protein, 10 aa, Artificial Sequence
  Description of Artificial Sequence: Synthetic epitope
QTDAVLQMQM

SEQ ID NO: 39413 - protein, 10 aa, Artificial Sequence
  Description of Artificial Sequence: Synthetic epitope
QTDDLAKEEP

SEQ ID NO: 39414 - protein, 10 aa, Artificial Sequence
  Description of Artificial Sequence: Synthetic epitope
QTDDSNKLLS

SEQ ID NO: 39415 - protein, 10 aa, Artificial Sequence
  Description of Artificial Sequence: Synthetic epitope
QTDEEDMGMT

SEQ ID NO: 39416 - protein, 10 aa, Artificial Sequence
  Description of Artificial Sequence: Synthetic epitope
QTDEILSKDQ

SEQ ID NO: 39417 - protein, 10 aa, Artificial Sequence
  Description of Artificial Sequence: Synthetic epitope
QTDELAEITE

SEQ ID NO: 39418 - protein, 10 aa, Artificial Sequence
  Description of Artificial Sequence: Synthetic epitope
QTDEQTNKEQ

SEQ ID NO: 39419 - protein, 10 aa, Artificial Sequence
  Description of Artificial Sequence: Synthetic epitope
QTDESNKETA

SEQ ID NO: 39420 - protein, 10 aa, Artificial Sequence
  Description of Artificial Sequence: Synthetic epitope
QTDHIKIDKA

SEQ ID NO: 39421 - protein, 10 aa, Artificial Sequence
  Description of Artificial Sequence: Synthetic epitope
QTDKSPSQPA

SEQ ID NO: 39422 - protein, 10 aa, Artificial Sequence
  Description of Artificial Sequence: Synthetic epitope
QTDPAAVKLE

SEQ ID NO: 39423 - protein, 10 aa, Artificial Sequence
  Description of Artificial Sequence: Synthetic epitope
QTDQPKAQGQ

SEQ ID NO: 39424 - protein, 10 aa, Artificial Sequence
  Description of Artificial Sequence: Synthetic epitope
QTDRDVITAL

SEQ ID NO: 39425 - protein, 10 aa, Artificial Sequence
  Description of Artificial Sequence: Synthetic epitope
QTDSVRFMAT

SEQ ID NO: 39426 - protein, 10 aa, Artificial Sequence
  Description of Artificial Sequence: Synthetic epitope
QTDTAQRATT

SEQ ID NO: 39427 - protein, 10 aa, Artificial Sequence
  Description of Artificial Sequence: Synthetic epitope
QTDTIVEEKK

SEQ ID NO: 39428 - protein, 10 aa, Artificial Sequence
  Description of Artificial Sequence: Synthetic epitope
QTDVRVTKFK

SEQ ID NO: 39429 - protein, 10 aa, Artificial Sequence
  Description of Artificial Sequence: Synthetic epitope
QTEAHLEIRE

SEQ ID NO: 39430 - protein, 10 aa, Artificial Sequence
  Description of Artificial Sequence: Synthetic epitope
QTEAMEFDIF

SEQ ID NO: 39431 - protein, 10 aa, Artificial Sequence
  Description of Artificial Sequence: Synthetic epitope
QTEAQATSAS

SEQ ID NO: 39432 - protein, 10 aa, Artificial Sequence
  Description of Artificial Sequence: Synthetic epitope
QTEAQVASAS

SEQ ID NO: 39433 - protein, 10 aa, Artificial Sequence
  Description of Artificial Sequence: Synthetic epitope
QTEATFDLSA

SEQ ID NO: 39434 - protein, 10 aa, Artificial Sequence
  Description of Artificial Sequence: Synthetic epitope
QTEDMETAKY

SEQ ID NO: 39435 - protein, 10 aa, Artificial Sequence
  Description of Artificial Sequence: Synthetic epitope
QTEEITSTTD

SEQ ID NO: 39436 - protein, 10 aa, Artificial Sequence
  Description of Artificial Sequence: Synthetic epitope
QTEGSIQQSE

SEQ ID NO: 39437 - protein, 10 aa, Artificial Sequence
  Description of Artificial Sequence: Synthetic epitope
QTEINEKLQI

SEQ ID NO: 39438 - protein, 10 aa, Artificial Sequence
  Description of Artificial Sequence: Synthetic epitope
QTEIQTVNKQ

SEQ ID NO: 39439 - protein, 10 aa, Artificial Sequence
  Description of Artificial Sequence: Synthetic epitope
QTEIVASSQA

SEQ ID NO: 39440 - protein, 10 aa, Artificial Sequence
  Description of Artificial Sequence: Synthetic epitope
QTEKTKEHKQ

SEQ ID NO: 39441 - protein, 10 aa, Artificial Sequence
  Description of Artificial Sequence: Synthetic epitope
QTELEGEDVG

SEQ ID NO: 39442 - protein, 10 aa, Artificial Sequence
  Description of Artificial Sequence: Synthetic epitope
QTELESLSSE

SEQ ID NO: 39443 - protein, 10 aa, Artificial Sequence
  Description of Artificial Sequence: Synthetic epitope
QTELPSTSTG

SEQ ID NO: 39444 - protein, 10 aa, Artificial Sequence
  Description of Artificial Sequence: Synthetic epitope
QTELSPNTSS

SEQ ID NO: 39445 - protein, 10 aa, Artificial Sequence
  Description of Artificial Sequence: Synthetic epitope
QTELSSGISE

SEQ ID NO: 39446 - protein, 10 aa, Artificial Sequence
  Description of Artificial Sequence: Synthetic epitope
QTENEIASKA

SEQ ID NO: 39447 - protein, 10 aa, Artificial Sequence
  Description of Artificial Sequence: Synthetic epitope
QTENFNIKQM

SEQ ID NO: 39448 - protein, 10 aa, Artificial Sequence
  Description of Artificial Sequence: Synthetic epitope
QTEQRVSLLE

SEQ ID NO: 39449 - protein, 10 aa, Artificial Sequence
  Description of Artificial Sequence: Synthetic epitope
QTESKAKVVD

SEQ ID NO: 39450 - protein, 10 aa, Artificial Sequence
  Description of Artificial Sequence: Synthetic epitope
QTESRTITPP

SEQ ID NO: 39451 - protein, 10 aa, Artificial Sequence
  Description of Artificial Sequence: Synthetic epitope
QTEVELAESK

SEQ ID NO: 39452 - protein, 10 aa, Artificial Sequence
  Description of Artificial Sequence: Synthetic epitope
QTEVKALSTQ

SEQ ID NO: 39453 - protein, 10 aa, Artificial Sequence
  Description of Artificial Sequence: Synthetic epitope
QTEVVIRDID

SEQ ID NO: 39454 - protein, 10 aa, Artificial Sequence
  Description of Artificial Sequence: Synthetic epitope
QTFAHEVDGR

SEQ ID NO: 39455 - protein, 10 aa, Artificial Sequence
  Description of Artificial Sequence: Synthetic epitope
QTFGETKMSN

SEQ ID NO: 39456 - protein, 10 aa, Artificial Sequence
  Description of Artificial Sequence: Synthetic epitope
QTFRGKENDT

SEQ ID NO: 39457 - protein, 10 aa, Artificial Sequence
  Description of Artificial Sequence: Synthetic epitope
QTFVALAAQL

SEQ ID NO: 39458 - protein, 10 aa, Artificial Sequence
  Description of Artificial Sequence: Synthetic epitope
QTFVKKAKSS

SEQ ID NO: 39459 - protein, 10 aa, Artificial Sequence
  Description of Artificial Sequence: Synthetic epitope
QTFVSAAGDE

SEQ ID NO: 39460 - protein, 10 aa, Artificial Sequence
  Description of Artificial Sequence: Synthetic epitope
QTFYKFMKRI

SEQ ID NO: 39461 - protein, 10 aa, Artificial Sequence
  Description of Artificial Sequence: Synthetic epitope
QTGDDKVREQ

SEQ ID NO: 39462 - protein, 10 aa, Artificial Sequence
  Description of Artificial Sequence: Synthetic epitope
QTGEASKLPY

SEQ ID NO: 39463 - protein, 10 aa, Artificial Sequence
  Description of Artificial Sequence: Synthetic epitope
QTGHVSSENK

SEQ ID NO: 39464 - protein, 10 aa, Artificial Sequence
  Description of Artificial Sequence: Synthetic epitope
QTGKLSMSEK

SEQ ID NO: 39465 - protein, 10 aa, Artificial Sequence
  Description of Artificial Sequence: Synthetic epitope
QTGLMKQMMT

SEQ ID NO: 39466 - protein, 10 aa, Artificial Sequence
  Description of Artificial Sequence: Synthetic epitope
QTGMHSSAAT

SEQ ID NO: 39467 - protein, 10 aa, Artificial Sequence
  Description of Artificial Sequence: Synthetic epitope
QTGMLISSMT

SEQ ID NO: 39468 - protein, 10 aa, Artificial Sequence
  Description of Artificial Sequence: Synthetic epitope
QTGRQLTAES

SEQ ID NO: 39469 - protein, 10 aa, Artificial Sequence
  Description of Artificial Sequence: Synthetic epitope
QTGTRTKKSS

SEQ ID NO: 39470 - protein, 10 aa, Artificial Sequence
  Description of Artificial Sequence: Synthetic epitope
QTGVLENVLN

SEQ ID NO: 39471 - protein, 10 aa, Artificial Sequence
  Description of Artificial Sequence: Synthetic epitope
QTGVNRASKG

SEQ ID NO: 39472 - protein, 10 aa, Artificial Sequence
  Description of Artificial Sequence: Synthetic epitope
QTHKSQESQL

SEQ ID NO: 39473 - protein, 10 aa, Artificial Sequence
  Description of Artificial Sequence: Synthetic epitope
QTHQQMRTLN

SEQ ID NO: 39474 - protein, 10 aa, Artificial Sequence
  Description of Artificial Sequence: Synthetic epitope
QTHRETAGDG

SEQ ID NO: 39475 - protein, 10 aa, Artificial Sequence
  Description of Artificial Sequence: Synthetic epitope
QTIAALQANK

SEQ ID NO: 39476 - protein, 10 aa, Artificial Sequence
  Description of Artificial Sequence: Synthetic epitope
QTIAKLDNQN

SEQ ID NO: 39477 - protein, 10 aa, Artificial Sequence
  Description of Artificial Sequence: Synthetic epitope
QTIAKQGKAV

SEQ ID NO: 39478 - protein, 10 aa, Artificial Sequence
  Description of Artificial Sequence: Synthetic epitope
QTIHLSKSMM

SEQ ID NO: 39479 - protein, 10 aa, Artificial Sequence
  Description of Artificial Sequence: Synthetic epitope
QTIIQGILIE

SEQ ID NO: 39480 - protein, 10 aa, Artificial Sequence
  Description of Artificial Sequence: Synthetic epitope
QTIKDNQAKK

SEQ ID NO: 39481 - protein, 10 aa, Artificial Sequence
  Description of Artificial Sequence: Synthetic epitope
QTIMESMGSK

SEQ ID NO: 39482 - protein, 10 aa, Artificial Sequence
  Description of Artificial Sequence: Synthetic epitope
QTIMESMGSK

SEQ ID NO: 39483 - protein, 10 aa, Artificial Sequence
  Description of Artificial Sequence: Synthetic epitope
QTIMKHVHPT

SEQ ID NO: 39484 - protein, 10 aa, Artificial Sequence
  Description of Artificial Sequence: Synthetic epitope
QTIMTMLQPR

SEQ ID NO: 39485 - protein, 10 aa, Artificial Sequence
  Description of Artificial Sequence: Synthetic epitope
QTIQENKPAT

SEQ ID NO: 39486 - protein, 10 aa, Artificial Sequence
  Description of Artificial Sequence: Synthetic epitope
QTIYETAARE

SEQ ID NO: 39487 - protein, 10 aa, Artificial Sequence
  Description of Artificial Sequence: Synthetic epitope
QTKAATVTKE

SEQ ID NO: 39488 - protein, 10 aa, Artificial Sequence
  Description of Artificial Sequence: Synthetic epitope
QTKAPLAATA

SEQ ID NO: 39489 - protein, 10 aa, Artificial Sequence
  Description of Artificial Sequence: Synthetic epitope
QTKAVESGLK

SEQ ID NO: 39490 - protein, 10 aa, Artificial Sequence
  Description of Artificial Sequence: Synthetic epitope
QTKESEILPE

SEQ ID NO: 39491 - protein, 10 aa, Artificial Sequence
  Description of Artificial Sequence: Synthetic epitope
QTKFPIVNAE

SEQ ID NO: 39492 - protein, 10 aa, Artificial Sequence
  Description of Artificial Sequence: Synthetic epitope
QTKGGNKSTV

SEQ ID NO: 39493 - protein, 10 aa, Artificial Sequence
  Description of Artificial Sequence: Synthetic epitope
QTKGLKVEPE

SEQ ID NO: 39494 - protein, 10 aa, Artificial Sequence
  Description of Artificial Sequence: Synthetic epitope
QTKIDAKKEQ

SEQ ID NO: 39495 - protein, 10 aa, Artificial Sequence
  Description of Artificial Sequence: Synthetic epitope
QTKLELVQQE

SEQ ID NO: 39496 - protein, 10 aa, Artificial Sequence
  Description of Artificial Sequence: Synthetic epitope
QTKNSLVPKQ

SEQ ID NO: 39497 - protein, 10 aa, Artificial Sequence
  Description of Artificial Sequence: Synthetic epitope
QTKQIVEKYA

SEQ ID NO: 39498 - protein, 10 aa, Artificial Sequence
  Description of Artificial Sequence: Synthetic epitope
QTKQYLASQE

SEQ ID NO: 39499 - protein, 10 aa, Artificial Sequence
  Description of Artificial Sequence: Synthetic epitope
QTKRNPNTKA

SEQ ID NO: 39500 - protein, 10 aa, Artificial Sequence
  Description of Artificial Sequence: Synthetic epitope
QTKRSSRRQS

SEQ ID NO: 39501 - protein, 10 aa, Artificial Sequence
  Description of Artificial Sequence: Synthetic epitope
QTKSDKTQPS

SEQ ID NO: 39502 - protein, 10 aa, Artificial Sequence
  Description of Artificial Sequence: Synthetic epitope
QTKSLKVSNI

SEQ ID NO: 39503 - protein, 10 aa, Artificial Sequence
  Description of Artificial Sequence: Synthetic epitope
QTKSPQHLQQ

SEQ ID NO: 39504 - protein, 10 aa, Artificial Sequence
  Description of Artificial Sequence: Synthetic epitope
QTKTKNIVEP

SEQ ID NO: 39505 - protein, 10 aa, Artificial Sequence
  Description of Artificial Sequence: Synthetic epitope
QTKTSQNLQT

SEQ ID NO: 39506 - protein, 10 aa, Artificial Sequence
  Description of Artificial Sequence: Synthetic epitope
QTKVAAVSAF

SEQ ID NO: 39507 - protein, 10 aa, Artificial Sequence
  Description of Artificial Sequence: Synthetic epitope
QTKVLKQLLM

SEQ ID NO: 39508 - protein, 10 aa, Artificial Sequence
  Description of Artificial Sequence: Synthetic epitope
QTKVMNSQMK

SEQ ID NO: 39509 - protein, 10 aa, Artificial Sequence
  Description of Artificial Sequence: Synthetic epitope
QTKVPKVGRV

SEQ ID NO: 39510 - protein, 10 aa, Artificial Sequence
  Description of Artificial Sequence: Synthetic epitope
QTKVQKKVQK

SEQ ID NO: 39511 - protein, 10 aa, Artificial Sequence
  Description of Artificial Sequence: Synthetic epitope
QTKYAQANSE

SEQ ID NO: 39512 - protein, 10 aa, Artificial Sequence
  Description of Artificial Sequence: Synthetic epitope
QTLAKAMDKF

SEQ ID NO: 39513 - protein, 10 aa, Artificial Sequence
  Description of Artificial Sequence: Synthetic epitope
QTLAMAVASQ

SEQ ID NO: 39514 - protein, 10 aa, Artificial Sequence
  Description of Artificial Sequence: Synthetic epitope
QTLATTEKQT

SEQ ID NO: 39515 - protein, 10 aa, Artificial Sequence
  Description of Artificial Sequence: Synthetic epitope
QTLDIMVEDV

SEQ ID NO: 39516 - protein, 10 aa, Artificial Sequence
  Description of Artificial Sequence: Synthetic epitope
QTLDSAALYH

SEQ ID NO: 39517 - protein, 10 aa, Artificial Sequence
  Description of Artificial Sequence: Synthetic epitope
QTLEALARDL

SEQ ID NO: 39518 - protein, 10 aa, Artificial Sequence
  Description of Artificial Sequence: Synthetic epitope
QTLELKSING

SEQ ID NO: 39519 - protein, 10 aa, Artificial Sequence
  Description of Artificial Sequence: Synthetic epitope
QTLESILRRE

SEQ ID NO: 39520 - protein, 10 aa, Artificial Sequence
  Description of Artificial Sequence: Synthetic epitope
QTLFELETET

SEQ ID NO: 39521 - protein, 10 aa, Artificial Sequence
  Description of Artificial Sequence: Synthetic epitope
QTLFSMKAIQ

SEQ ID NO: 39522 - protein, 10 aa, Artificial Sequence
  Description of Artificial Sequence: Synthetic epitope
QTLFSMKAIQ

SEQ ID NO: 39523 - protein, 10 aa, Artificial Sequence
  Description of Artificial Sequence: Synthetic epitope
QTLGLASIDE

SEQ ID NO: 39524 - protein, 10 aa, Artificial Sequence
  Description of Artificial Sequence: Synthetic epitope
QTLGLDLVLE

SEQ ID NO: 39525 - protein, 10 aa, Artificial Sequence
  Description of Artificial Sequence: Synthetic epitope
QTLHLRSTQR

SEQ ID NO: 39526 - protein, 10 aa, Artificial Sequence
  Description of Artificial Sequence: Synthetic epitope
QTLIEIRDFD

SEQ ID NO: 39527 - protein, 10 aa, Artificial Sequence
  Description of Artificial Sequence: Synthetic epitope
QTLIKTLIFE

SEQ ID NO: 39528 - protein, 10 aa, Artificial Sequence
  Description of Artificial Sequence: Synthetic epitope
QTLISVVDSS

SEQ ID NO: 39529 - protein, 10 aa, Artificial Sequence
  Description of Artificial Sequence: Synthetic epitope
QTLITKRVMF

SEQ ID NO: 39530 - protein, 10 aa, Artificial Sequence
  Description of Artificial Sequence: Synthetic epitope
QTLKARIEIP

SEQ ID NO: 39531 - protein, 10 aa, Artificial Sequence
  Description of Artificial Sequence: Synthetic epitope
QTLKLDSKES

SEQ ID NO: 39532 - protein, 10 aa, Artificial Sequence
  Description of Artificial Sequence: Synthetic epitope
QTLKLLSRPE

SEQ ID NO: 39533 - protein, 10 aa, Artificial Sequence
  Description of Artificial Sequence: Synthetic epitope
QTLKQAASTD

SEQ ID NO: 39534 - protein, 10 aa, Artificial Sequence
  Description of Artificial Sequence: Synthetic epitope
QTLKRSSTGS

SEQ ID NO: 39535 - protein, 10 aa, Artificial Sequence
  Description of Artificial Sequence: Synthetic epitope
QTLLASSETT

SEQ ID NO: 39536 - protein, 10 aa, Artificial Sequence
  Description of Artificial Sequence: Synthetic epitope
QTLLEATTSS

SEQ ID NO: 39537 - protein, 10 aa, Artificial Sequence
  Description of Artificial Sequence: Synthetic epitope
QTLLISQVAT

SEQ ID NO: 39538 - protein, 10 aa, Artificial Sequence
  Description of Artificial Sequence: Synthetic epitope
QTLLRQLSEI

SEQ ID NO: 39539 - protein, 10 aa, Artificial Sequence
  Description of Artificial Sequence: Synthetic epitope
QTLLSLSLRE

SEQ ID NO: 39540 - protein, 10 aa, Artificial Sequence
  Description of Artificial Sequence: Synthetic epitope
QTLMDTLKSQ

SEQ ID NO: 39541 - protein, 10 aa, Artificial Sequence
  Description of Artificial Sequence: Synthetic epitope
QTLMKVAAQN

SEQ ID NO: 39542 - protein, 10 aa, Artificial Sequence
  Description of Artificial Sequence: Synthetic epitope
QTLNAIKLEE

SEQ ID NO: 39543 - protein, 10 aa, Artificial Sequence
  Description of Artificial Sequence: Synthetic epitope
QTLNILFENI

SEQ ID NO: 39544 - protein, 10 aa, Artificial Sequence
  Description of Artificial Sequence: Synthetic epitope
QTLNSSLYID

SEQ ID NO: 39545 - protein, 10 aa, Artificial Sequence
  Description of Artificial Sequence: Synthetic epitope
QTLQAAEGEA

SEQ ID NO: 39546 - protein, 10 aa, Artificial Sequence
  Description of Artificial Sequence: Synthetic epitope
QTLQVASLST

SEQ ID NO: 39547 - protein, 10 aa, Artificial Sequence
  Description of Artificial Sequence: Synthetic epitope
QTLRDRRLYI

SEQ ID NO: 39548 - protein, 10 aa, Artificial Sequence
  Description of Artificial Sequence: Synthetic epitope
QTLSLSSEST

SEQ ID NO: 39549 - protein, 10 aa, Artificial Sequence
  Description of Artificial Sequence: Synthetic epitope
QTLSMLQDGA

SEQ ID NO: 39550 - protein, 10 aa, Artificial Sequence
  Description of Artificial Sequence: Synthetic epitope
QTLSSGQTLN

SEQ ID NO: 39551 - protein, 10 aa, Artificial Sequence
  Description of Artificial Sequence: Synthetic epitope
QTLSVEMDQV

SEQ ID NO: 39552 - protein, 10 aa, Artificial Sequence
  Description of Artificial Sequence: Synthetic epitope
QTLSVLQAQV

SEQ ID NO: 39553 - protein, 10 aa, Artificial Sequence
  Description of Artificial Sequence: Synthetic epitope
QTLTKQDEND

SEQ ID NO: 39554 - protein, 10 aa, Artificial Sequence
  Description of Artificial Sequence: Synthetic epitope
QTLVKDVAIL

SEQ ID NO: 39555 - protein, 10 aa, Artificial Sequence
  Description of Artificial Sequence: Synthetic epitope
QTLYSMATQA

SEQ ID NO: 39556 - protein, 10 aa, Artificial Sequence
  Description of Artificial Sequence: Synthetic epitope
QTLYSMATQA

SEQ ID NO: 39557 - protein, 10 aa, Artificial Sequence
  Description of Artificial Sequence: Synthetic epitope
QTLYSMATQA

SEQ ID NO: 39558 - protein, 10 aa, Artificial Sequence
  Description of Artificial Sequence: Synthetic epitope
QTMASKNISQ

SEQ ID NO: 39559 - protein, 10 aa, Artificial Sequence
  Description of Artificial Sequence: Synthetic epitope
QTMAVKSLSP

SEQ ID NO: 39560 - protein, 10 aa, Artificial Sequence
  Description of Artificial Sequence: Synthetic epitope
QTMLAGVQYP

SEQ ID NO: 39561 - protein, 10 aa, Artificial Sequence
  Description of Artificial Sequence: Synthetic epitope
QTMLQTSRDT

SEQ ID NO: 39562 - protein, 10 aa, Artificial Sequence
  Description of Artificial Sequence: Synthetic epitope
QTMRLGRSPS

SEQ ID NO: 39563 - protein, 10 aa, Artificial Sequence
  Description of Artificial Sequence: Synthetic epitope
QTMTSSGAQK

SEQ ID NO: 39564 - protein, 10 aa, Artificial Sequence
  Description of Artificial Sequence: Synthetic epitope
QTNASQSKGE

SEQ ID NO: 39565 - protein, 10 aa, Artificial Sequence
  Description of Artificial Sequence: Synthetic epitope
QTNEEKIMDS

SEQ ID NO: 39566 - protein, 10 aa, Artificial Sequence
  Description of Artificial Sequence: Synthetic epitope
QTNEQSSVWA

SEQ ID NO: 39567 - protein, 10 aa, Artificial Sequence
  Description of Artificial Sequence: Synthetic epitope
QTNERRQVGP

SEQ ID NO: 39568 - protein, 10 aa, Artificial Sequence
  Description of Artificial Sequence: Synthetic epitope
QTNGIADDRQ

SEQ ID NO: 39569 - protein, 10 aa, Artificial Sequence
  Description of Artificial Sequence: Synthetic epitope
QTNGSDLSAE

SEQ ID NO: 39570 - protein, 10 aa, Artificial Sequence
  Description of Artificial Sequence: Synthetic epitope
QTNHTLKQTL

SEQ ID NO: 39571 - protein, 10 aa, Artificial Sequence
  Description of Artificial Sequence: Synthetic epitope
QTNIKKSPGK

SEQ ID NO: 39572 - protein, 10 aa, Artificial Sequence
  Description of Artificial Sequence: Synthetic epitope
QTNLTVEPGA

SEQ ID NO: 39573 - protein, 10 aa, Artificial Sequence
  Description of Artificial Sequence: Synthetic epitope
QTNMRDFQTE

SEQ ID NO: 39574 - protein, 10 aa, Artificial Sequence
  Description of Artificial Sequence: Synthetic epitope
QTNPLVRLGA

SEQ ID NO: 39575 - protein, 10 aa, Artificial Sequence
  Description of Artificial Sequence: Synthetic epitope
QTNQHDKARA

SEQ ID NO: 39576 - protein, 10 aa, Artificial Sequence
  Description of Artificial Sequence: Synthetic epitope
QTNQPLVSSQ

SEQ ID NO: 39577 - protein, 10 aa, Artificial Sequence
  Description of Artificial Sequence: Synthetic epitope
QTNQSGKKAP

SEQ ID NO: 39578 - protein, 10 aa, Artificial Sequence
  Description of Artificial Sequence: Synthetic epitope
QTNSSVPAKT

SEQ ID NO: 39579 - protein, 10 aa, Artificial Sequence
  Description of Artificial Sequence: Synthetic epitope
QTNVRTFSPT

SEQ ID NO: 39580 - protein, 10 aa, Artificial Sequence
  Description of Artificial Sequence: Synthetic epitope
QTPAATESEA

SEQ ID NO: 39581 - protein, 10 aa, Artificial Sequence
  Description of Artificial Sequence: Synthetic epitope
QTPAVTPQSQ

SEQ ID NO: 39582 - protein, 10 aa, Artificial Sequence
  Description of Artificial Sequence: Synthetic epitope
QTPERSRILA

SEQ ID NO: 39583 - protein, 10 aa, Artificial Sequence
  Description of Artificial Sequence: Synthetic epitope
QTPKFVPSSR

SEQ ID NO: 39584 - protein, 10 aa, Artificial Sequence
  Description of Artificial Sequence: Synthetic epitope
QTPSGQSSAT

SEQ ID NO: 39585 - protein, 10 aa, Artificial Sequence
  Description of Artificial Sequence: Synthetic epitope
QTPSLQSPSP

SEQ ID NO: 39586 - protein, 10 aa, Artificial Sequence
  Description of Artificial Sequence: Synthetic epitope
QTPSRAIPAT

SEQ ID NO: 39587 - protein, 10 aa, Artificial Sequence
  Description of Artificial Sequence: Synthetic epitope
QTPVVSTRKG

SEQ ID NO: 39588 - protein, 10 aa, Artificial Sequence
  Description of Artificial Sequence: Synthetic epitope
QTQAGATQTV

SEQ ID NO: 39589 - protein, 10 aa, Artificial Sequence
  Description of Artificial Sequence: Synthetic epitope
QTQAKLVLEE

SEQ ID NO: 39590 - protein, 10 aa, Artificial Sequence
  Description of Artificial Sequence: Synthetic epitope
QTQDLVKSVQ

SEQ ID NO: 39591 - protein, 10 aa, Artificial Sequence
  Description of Artificial Sequence: Synthetic epitope
QTQEMVSNFD

SEQ ID NO: 39592 - protein, 10 aa, Artificial Sequence
  Description of Artificial Sequence: Synthetic epitope
QTQENMTEEA

SEQ ID NO: 39593 - protein, 10 aa, Artificial Sequence
  Description of Artificial Sequence: Synthetic epitope
QTQGALGGSR

SEQ ID NO: 39594 - protein, 10 aa, Artificial Sequence
  Description of Artificial Sequence: Synthetic epitope
QTQIETKNPR

SEQ ID NO: 39595 - protein, 10 aa, Artificial Sequence
  Description of Artificial Sequence: Synthetic epitope
QTQISSLRSG

SEQ ID NO: 39596 - protein, 10 aa, Artificial Sequence
  Description of Artificial Sequence: Synthetic epitope
QTQLAEQGEE

SEQ ID NO: 39597 - protein, 10 aa, Artificial Sequence
  Description of Artificial Sequence: Synthetic epitope
QTQLKEVLRE

SEQ ID NO: 39598 - protein, 10 aa, Artificial Sequence
  Description of Artificial Sequence: Synthetic epitope
QTQLKQTEVL

SEQ ID NO: 39599 - protein, 10 aa, Artificial Sequence
  Description of Artificial Sequence: Synthetic epitope
QTQLLNSEDG

SEQ ID NO: 39600 - protein, 10 aa, Artificial Sequence
  Description of Artificial Sequence: Synthetic epitope
QTQLRAAQDR

SEQ ID NO: 39601 - protein, 10 aa, Artificial Sequence
  Description of Artificial Sequence: Synthetic epitope
QTQLRKAEAV

SEQ ID NO: 39602 - protein, 10 aa, Artificial Sequence
  Description of Artificial Sequence: Synthetic epitope
QTQLSKLKPG

SEQ ID NO: 39603 - protein, 10 aa, Artificial Sequence
  Description of Artificial Sequence: Synthetic epitope
QTQMDQDEGT

SEQ ID NO: 39604 - protein, 10 aa, Artificial Sequence
  Description of Artificial Sequence: Synthetic epitope
QTQNDLVTGA

SEQ ID NO: 39605 - protein, 10 aa, Artificial Sequence
  Description of Artificial Sequence: Synthetic epitope
QTQPKAHTTG

SEQ ID NO: 39606 - protein, 10 aa, Artificial Sequence
  Description of Artificial Sequence: Synthetic epitope
QTQRVMANVR

SEQ ID NO: 39607 - protein, 10 aa, Artificial Sequence
  Description of Artificial Sequence: Synthetic epitope
QTQTALENEV

SEQ ID NO: 39608 - protein, 10 aa, Artificial Sequence
  Description of Artificial Sequence: Synthetic epitope
QTQVAKAAFK

SEQ ID NO: 39609 - protein, 10 aa, Artificial Sequence
  Description of Artificial Sequence: Synthetic epitope
QTQVMEVGNE

SEQ ID NO: 39610 - protein, 10 aa, Artificial Sequence
  Description of Artificial Sequence: Synthetic epitope
QTQVNRYKIS

SEQ ID NO: 39611 - protein, 10 aa, Artificial Sequence
  Description of Artificial Sequence: Synthetic epitope
QTRASVKLVK

SEQ ID NO: 39612 - protein, 10 aa, Artificial Sequence
  Description of Artificial Sequence: Synthetic epitope
QTRGTAEPIT

SEQ ID NO: 39613 - protein, 10 aa, Artificial Sequence
  Description of Artificial Sequence: Synthetic epitope
QTRISVGKAN

SEQ ID NO: 39614 - protein, 10 aa, Artificial Sequence
  Description of Artificial Sequence: Synthetic epitope
QTRKNKKLAP

SEQ ID NO: 39615 - protein, 10 aa, Artificial Sequence
  Description of Artificial Sequence: Synthetic epitope
QTRMVHASAS

SEQ ID NO: 39616 - protein, 10 aa, Artificial Sequence
  Description of Artificial Sequence: Synthetic epitope
QTRPEKVQSA

SEQ ID NO: 39617 - protein, 10 aa, Artificial Sequence
  Description of Artificial Sequence: Synthetic epitope
QTRQSNIFKI

SEQ ID NO: 39618 - protein, 10 aa, Artificial Sequence
  Description of Artificial Sequence: Synthetic epitope
QTRRSISSDT

SEQ ID NO: 39619 - protein, 10 aa, Artificial Sequence
  Description of Artificial Sequence: Synthetic epitope
QTRTVRDHAQ

SEQ ID NO: 39620 - protein, 10 aa, Artificial Sequence
  Description of Artificial Sequence: Synthetic epitope
QTRVVGRLQK

SEQ ID NO: 39621 - protein, 10 aa, Artificial Sequence
  Description of Artificial Sequence: Synthetic epitope
QTSAETNKKT

SEQ ID NO: 39622 - protein, 10 aa, Artificial Sequence
  Description of Artificial Sequence: Synthetic epitope
QTSANSSFEP

SEQ ID NO: 39623 - protein, 10 aa, Artificial Sequence
  Description of Artificial Sequence: Synthetic epitope
QTSDELLTEP

SEQ ID NO: 39624 - protein, 10 aa, Artificial Sequence
  Description of Artificial Sequence: Synthetic epitope
QTSDNNALTP

SEQ ID NO: 39625 - protein, 10 aa, Artificial Sequence
  Description of Artificial Sequence: Synthetic epitope
QTSDSVKKEP

SEQ ID NO: 39626 - protein, 10 aa, Artificial Sequence
  Description of Artificial Sequence: Synthetic epitope
QTSELTLGKK

SEQ ID NO: 39627 - protein, 10 aa, Artificial Sequence
  Description of Artificial Sequence: Synthetic epitope
QTSEQTKSLS

SEQ ID NO: 39628 - protein, 10 aa, Artificial Sequence
  Description of Artificial Sequence: Synthetic epitope
QTSGNSSAVL

SEQ ID NO: 39629 - protein, 10 aa, Artificial Sequence
  Description of Artificial Sequence: Synthetic epitope
QTSGTNEQSS

SEQ ID NO: 39630 - protein, 10 aa, Artificial Sequence
  Description of Artificial Sequence: Synthetic epitope
QTSIEERVAH

SEQ ID NO: 39631 - protein, 10 aa, Artificial Sequence
  Description of Artificial Sequence: Synthetic epitope
QTSIEPSKSS

SEQ ID NO: 39632 - protein, 10 aa, Artificial Sequence
  Description of Artificial Sequence: Synthetic epitope
QTSINKTFKK

SEQ ID NO: 39633 - protein, 10 aa, Artificial Sequence
  Description of Artificial Sequence: Synthetic epitope
QTSKSEGTQP

SEQ ID NO: 39634 - protein, 10 aa, Artificial Sequence
  Description of Artificial Sequence: Synthetic epitope
QTSLAERATA

SEQ ID NO: 39635 - protein, 10 aa, Artificial Sequence
  Description of Artificial Sequence: Synthetic epitope
QTSLDRAQID

SEQ ID NO: 39636 - protein, 10 aa, Artificial Sequence
  Description of Artificial Sequence: Synthetic epitope
QTSLQEGQMI

SEQ ID NO: 39637 - protein, 10 aa, Artificial Sequence
  Description of Artificial Sequence: Synthetic epitope
QTSLTASINK

SEQ ID NO: 39638 - protein, 10 aa, Artificial Sequence
  Description of Artificial Sequence: Synthetic epitope
QTSLTSTSEF

SEQ ID NO: 39639 - protein, 10 aa, Artificial Sequence
  Description of Artificial Sequence: Synthetic epitope
QTSLVKFVGN

SEQ ID NO: 39640 - protein, 10 aa, Artificial Sequence
  Description of Artificial Sequence: Synthetic epitope
QTSMEVSDLR

SEQ ID NO: 39641 - protein, 10 aa, Artificial Sequence
  Description of Artificial Sequence: Synthetic epitope
QTSMLKSTKF

SEQ ID NO: 39642 - protein, 10 aa, Artificial Sequence
  Description of Artificial Sequence: Synthetic epitope
QTSPKSSQNH

SEQ ID NO: 39643 - protein, 10 aa, Artificial Sequence
  Description of Artificial Sequence: Synthetic epitope
QTSQDLSTHL

SEQ ID NO: 39644 - protein, 10 aa, Artificial Sequence
  Description of Artificial Sequence: Synthetic epitope
QTSQITKIPI

SEQ ID NO: 39645 - protein, 10 aa, Artificial Sequence
  Description of Artificial Sequence: Synthetic epitope
QTSRLAKSKM

SEQ ID NO: 39646 - protein, 10 aa, Artificial Sequence
  Description of Artificial Sequence: Synthetic epitope
QTSRPISRDS

SEQ ID NO: 39647 - protein, 10 aa, Artificial Sequence
  Description of Artificial Sequence: Synthetic epitope
QTSRQAQAQL

SEQ ID NO: 39648 - protein, 10 aa, Artificial Sequence
  Description of Artificial Sequence: Synthetic epitope
QTSSKVTGPG

SEQ ID NO: 39649 - protein, 10 aa, Artificial Sequence
  Description of Artificial Sequence: Synthetic epitope
QTSSVSSVNP

SEQ ID NO: 39650 - protein, 10 aa, Artificial Sequence
  Description of Artificial Sequence: Synthetic epitope
QTSVATTQTP

SEQ ID NO: 39651 - protein, 10 aa, Artificial Sequence
  Description of Artificial Sequence: Synthetic epitope
QTSVEKSEDH

SEQ ID NO: 39652 - protein, 10 aa, Artificial Sequence
  Description of Artificial Sequence: Synthetic epitope
QTSVTALPSK

SEQ ID NO: 39653 - protein, 10 aa, Artificial Sequence
  Description of Artificial Sequence: Synthetic epitope
QTSVTQAQRE

SEQ ID NO: 39654 - protein, 10 aa, Artificial Sequence
  Description of Artificial Sequence: Synthetic epitope
QTSVVSGAPT

SEQ ID NO: 39655 - protein, 10 aa, Artificial Sequence
  Description of Artificial Sequence: Synthetic epitope
QTSVVSILTS

SEQ ID NO: 39656 - protein, 10 aa, Artificial Sequence
  Description of Artificial Sequence: Synthetic epitope
QTSYSTTSLP

SEQ ID NO: 39657 - protein, 10 aa, Artificial Sequence
  Description of Artificial Sequence: Synthetic epitope
QTTAKRHPSQ

SEQ ID NO: 39658 - protein, 10 aa, Artificial Sequence
  Description of Artificial Sequence: Synthetic epitope
QTTAMEAQTT

SEQ ID NO: 39659 - protein, 10 aa, Artificial Sequence
  Description of Artificial Sequence: Synthetic epitope
QTTASANIES

SEQ ID NO: 39660 - protein, 10 aa, Artificial Sequence
  Description of Artificial Sequence: Synthetic epitope
QTTAVGTAEH

SEQ ID NO: 39661 - protein, 10 aa, Artificial Sequence
  Description of Artificial Sequence: Synthetic epitope
QTTDLDRAAG

SEQ ID NO: 39662 - protein, 10 aa, Artificial Sequence
  Description of Artificial Sequence: Synthetic epitope
QTTEEPPSRT

SEQ ID NO: 39663 - protein, 10 aa, Artificial Sequence
  Description of Artificial Sequence: Synthetic epitope
QTTEFIVSDS

SEQ ID NO: 39664 - protein, 10 aa, Artificial Sequence
  Description of Artificial Sequence: Synthetic epitope
QTTEKQGAQQ

SEQ ID NO: 39665 - protein, 10 aa, Artificial Sequence
  Description of Artificial Sequence: Synthetic epitope
QTTEQQAGAS

SEQ ID NO: 39666 - protein, 10 aa, Artificial Sequence
  Description of Artificial Sequence: Synthetic epitope
QTTERQLLEA

SEQ ID NO: 39667 - protein, 10 aa, Artificial Sequence
  Description of Artificial Sequence: Synthetic epitope
QTTETEIQET

SEQ ID NO: 39668 - protein, 10 aa, Artificial Sequence
  Description of Artificial Sequence: Synthetic epitope
QTTETQSLSL

SEQ ID NO: 39669 - protein, 10 aa, Artificial Sequence
  Description of Artificial Sequence: Synthetic epitope
QTTGITAASP

SEQ ID NO: 39670 - protein, 10 aa, Artificial Sequence
  Description of Artificial Sequence: Synthetic epitope
QTTKYTSEKE

SEQ ID NO: 39671 - protein, 10 aa, Artificial Sequence
  Description of Artificial Sequence: Synthetic epitope
QTTLKSSERS

SEQ ID NO: 39672 - protein, 10 aa, Artificial Sequence
  Description of Artificial Sequence: Synthetic epitope
QTTMNVIKKP

SEQ ID NO: 39673 - protein, 10 aa, Artificial Sequence
  Description of Artificial Sequence: Synthetic epitope
QTTNNEIKDD

SEQ ID NO: 39674 - protein, 10 aa, Artificial Sequence
  Description of Artificial Sequence: Synthetic epitope
QTTRSLRTKI

SEQ ID NO: 39675 - protein, 10 aa, Artificial Sequence
  Description of Artificial Sequence: Synthetic epitope
QTTSYVAESS

SEQ ID NO: 39676 - protein, 10 aa, Artificial Sequence
  Description of Artificial Sequence: Synthetic epitope
QTVAAPQVQQ

SEQ ID NO: 39677 - protein, 10 aa, Artificial Sequence
  Description of Artificial Sequence: Synthetic epitope
QTVAEVITEQ

SEQ ID NO: 39678 - protein, 10 aa, Artificial Sequence
  Description of Artificial Sequence: Synthetic epitope
QTVEKNSRPQ

SEQ ID NO: 39679 - protein, 10 aa, Artificial Sequence
  Description of Artificial Sequence: Synthetic epitope
QTVIQKLHNK

SEQ ID NO: 39680 - protein, 10 aa, Artificial Sequence
  Description of Artificial Sequence: Synthetic epitope
QTVIRSLNRT

SEQ ID NO: 39681 - protein, 10 aa, Artificial Sequence
  Description of Artificial Sequence: Synthetic epitope
QTVKAVQKLS

SEQ ID NO: 39682 - protein, 10 aa, Artificial Sequence
  Description of Artificial Sequence: Synthetic epitope
QTVKVINQYQ

SEQ ID NO: 39683 - protein, 10 aa, Artificial Sequence
  Description of Artificial Sequence: Synthetic epitope
QTVLARISGY

SEQ ID NO: 39684 - protein, 10 aa, Artificial Sequence
  Description of Artificial Sequence: Synthetic epitope
QTVLETEDVT

SEQ ID NO: 39685 - protein, 10 aa, Artificial Sequence
  Description of Artificial Sequence: Synthetic epitope
QTVLSELKLK

SEQ ID NO: 39686 - protein, 10 aa, Artificial Sequence
  Description of Artificial Sequence: Synthetic epitope
QTVLSLIQNS

SEQ ID NO: 39687 - protein, 10 aa, Artificial Sequence
  Description of Artificial Sequence: Synthetic epitope
QTVPALNLQN

SEQ ID NO: 39688 - protein, 10 aa, Artificial Sequence
  Description of Artificial Sequence: Synthetic epitope
QTVPQTEVDK

SEQ ID NO: 39689 - protein, 10 aa, Artificial Sequence
  Description of Artificial Sequence: Synthetic epitope
QTVQSSGNMT

SEQ ID NO: 39690 - protein, 10 aa, Artificial Sequence
  Description of Artificial Sequence: Synthetic epitope
QTVSPASLLT

SEQ ID NO: 39691 - protein, 10 aa, Artificial Sequence
  Description of Artificial Sequence: Synthetic epitope
QTVTKLKTVT

SEQ ID NO: 39692 - protein, 10 aa, Artificial Sequence
  Description of Artificial Sequence: Synthetic epitope
QTVTKLTRGG

SEQ ID NO: 39693 - protein, 10 aa, Artificial Sequence
  Description of Artificial Sequence: Synthetic epitope
QTVTKTSLQN

SEQ ID NO: 39694 - protein, 10 aa, Artificial Sequence
  Description of Artificial Sequence: Synthetic epitope
QTVTREKEEL

SEQ ID NO: 39695 - protein, 10 aa, Artificial Sequence
  Description of Artificial Sequence: Synthetic epitope
QTVVYVVGKA

SEQ ID NO: 39696 - protein, 10 aa, Artificial Sequence
  Description of Artificial Sequence: Synthetic epitope
QTVYLREISS

SEQ ID NO: 39697 - protein, 10 aa, Artificial Sequence
  Description of Artificial Sequence: Synthetic epitope
QTWALYVANR

SEQ ID NO: 39698 - protein, 10 aa, Artificial Sequence
  Description of Artificial Sequence: Synthetic epitope
QTWKLFSSHM

SEQ ID NO: 39699 - protein, 10 aa, Artificial Sequence
  Description of Artificial Sequence: Synthetic epitope
QTYAAPSMAQ

SEQ ID NO: 39700 - protein, 10 aa, Artificial Sequence
  Description of Artificial Sequence: Synthetic epitope
QTYAKLRQVP

SEQ ID NO: 39701 - protein, 10 aa, Artificial Sequence
  Description of Artificial Sequence: Synthetic epitope
QTYQSTAEEN

SEQ ID NO: 39702 - protein, 10 aa, Artificial Sequence
  Description of Artificial Sequence: Synthetic epitope
QTYRKNVQQM

SEQ ID NO: 39703 - protein, 10 aa, Artificial Sequence
  Description of Artificial Sequence: Synthetic epitope
QTYYETLEKN

SEQ ID NO: 39704 - protein, 10 aa, Artificial Sequence
  Description of Artificial Sequence: Synthetic epitope
QVAAEISQEL

SEQ ID NO: 39705 - protein, 10 aa, Artificial Sequence
  Description of Artificial Sequence: Synthetic epitope
QVAAEQVAAQ

SEQ ID NO: 39706 - protein, 10 aa, Artificial Sequence
  Description of Artificial Sequence: Synthetic epitope
QVADKVSSGK

SEQ ID NO: 39707 - protein, 10 aa, Artificial Sequence
  Description of Artificial Sequence: Synthetic epitope
QVAEAEVKEK

SEQ ID NO: 39708 - protein, 10 aa, Artificial Sequence
  Description of Artificial Sequence: Synthetic epitope
QVAIDIREIH

SEQ ID NO: 39709 - protein, 10 aa, Artificial Sequence
  Description of Artificial Sequence: Synthetic epitope
QVAKTSAAQA

SEQ ID NO: 39710 - protein, 10 aa, Artificial Sequence
  Description of Artificial Sequence: Synthetic epitope
QVALGISENM

SEQ ID NO: 39711 - protein, 10 aa, Artificial Sequence
  Description of Artificial Sequence: Synthetic epitope
QVALGSKNSV

SEQ ID NO: 39712 - protein, 10 aa, Artificial Sequence
  Description of Artificial Sequence: Synthetic epitope
QVALQSLSHA

SEQ ID NO: 39713 - protein, 10 aa, Artificial Sequence
  Description of Artificial Sequence: Synthetic epitope
QVAMLARARG

SEQ ID NO: 39714 - protein, 10 aa, Artificial Sequence
  Description of Artificial Sequence: Synthetic epitope
QVANSIITGN

SEQ ID NO: 39715 - protein, 10 aa, Artificial Sequence
  Description of Artificial Sequence: Synthetic epitope
QVANVWPTKY

SEQ ID NO: 39716 - protein, 10 aa, Artificial Sequence
  Description of Artificial Sequence: Synthetic epitope
QVAPAQLVTR

SEQ ID NO: 39717 - protein, 10 aa, Artificial Sequence
  Description of Artificial Sequence: Synthetic epitope
QVAPLSVMAK

SEQ ID NO: 39718 - protein, 10 aa, Artificial Sequence
  Description of Artificial Sequence: Synthetic epitope
QVAQALSAAN

SEQ ID NO: 39719 - protein, 10 aa, Artificial Sequence
  Description of Artificial Sequence: Synthetic epitope
QVARKQDTRQ

SEQ ID NO: 39720 - protein, 10 aa, Artificial Sequence
  Description of Artificial Sequence: Synthetic epitope
QVARVDVSSK

SEQ ID NO: 39721 - protein, 10 aa, Artificial Sequence
  Description of Artificial Sequence: Synthetic epitope
QVASASIKLE

SEQ ID NO: 39722 - protein, 10 aa, Artificial Sequence
  Description of Artificial Sequence: Synthetic epitope
QVASLSRAGL

SEQ ID NO: 39723 - protein, 10 aa, Artificial Sequence
  Description of Artificial Sequence: Synthetic epitope
QVASSDATNI

SEQ ID NO: 39724 - protein, 10 aa, Artificial Sequence
  Description of Artificial Sequence: Synthetic epitope
QVAVNLAEDT

SEQ ID NO: 39725 - protein, 10 aa, Artificial Sequence
  Description of Artificial Sequence: Synthetic epitope
QVDAQLVPYI

SEQ ID NO: 39726 - protein, 10 aa, Artificial Sequence
  Description of Artificial Sequence: Synthetic epitope
QVDATDVMKH

SEQ ID NO: 39727 - protein, 10 aa, Artificial Sequence
  Description of Artificial Sequence: Synthetic epitope
QVDEATIRAI

SEQ ID NO: 39728 - protein, 10 aa, Artificial Sequence
  Description of Artificial Sequence: Synthetic epitope
QVDEEAALEQ

SEQ ID NO: 39729 - protein, 10 aa, Artificial Sequence
  Description of Artificial Sequence: Synthetic epitope
QVDKKATQQD

SEQ ID NO: 39730 - protein, 10 aa, Artificial Sequence
  Description of Artificial Sequence: Synthetic epitope
QVDLPHTAIQ

SEQ ID NO: 39731 - protein, 10 aa, Artificial Sequence
  Description of Artificial Sequence: Synthetic epitope
QVDNTVMEKQ

SEQ ID NO: 39732 - protein, 10 aa, Artificial Sequence
  Description of Artificial Sequence: Synthetic epitope
QVDQTGSKSS

SEQ ID NO: 39733 - protein, 10 aa, Artificial Sequence
  Description of Artificial Sequence: Synthetic epitope
QVDRAVDALD

SEQ ID NO: 39734 - protein, 10 aa, Artificial Sequence
  Description of Artificial Sequence: Synthetic epitope
QVDRSIIQQH

SEQ ID NO: 39735 - protein, 10 aa, Artificial Sequence
  Description of Artificial Sequence: Synthetic epitope
QVDSVKSSRS

SEQ ID NO: 39736 - protein, 10 aa, Artificial Sequence
  Description of Artificial Sequence: Synthetic epitope
QVEISRQPFS

SEQ ID NO: 39737 - protein, 10 aa, Artificial Sequence
  Description of Artificial Sequence: Synthetic epitope
QVEKASQAEA

SEQ ID NO: 39738 - protein, 10 aa, Artificial Sequence
  Description of Artificial Sequence: Synthetic epitope
QVEKDYKIKL

SEQ ID NO: 39739 - protein, 10 aa, Artificial Sequence
  Description of Artificial Sequence: Synthetic epitope
QVEKNMQKVE

SEQ ID NO: 39740 - protein, 10 aa, Artificial Sequence
  Description of Artificial Sequence: Synthetic epitope
QVELSSMKDR

SEQ ID NO: 39741 - protein, 10 aa, Artificial Sequence
  Description of Artificial Sequence: Synthetic epitope
QVEMKKMESD

SEQ ID NO: 39742 - protein, 10 aa, Artificial Sequence
  Description of Artificial Sequence: Synthetic epitope
QVENEHVLKS

SEQ ID NO: 39743 - protein, 10 aa, Artificial Sequence
  Description of Artificial Sequence: Synthetic epitope
QVEQKMMTQT

SEQ ID NO: 39744 - protein, 10 aa, Artificial Sequence
  Description of Artificial Sequence: Synthetic epitope
QVESASKHLD

SEQ ID NO: 39745 - protein, 10 aa, Artificial Sequence
  Description of Artificial Sequence: Synthetic epitope
QVEVKSVQES

SEQ ID NO: 39746 - protein, 10 aa, Artificial Sequence
  Description of Artificial Sequence: Synthetic epitope
QVFAALANQK

SEQ ID NO: 39747 - protein, 10 aa, Artificial Sequence
  Description of Artificial Sequence: Synthetic epitope
QVFAVQRIFE

SEQ ID NO: 39748 - protein, 10 aa, Artificial Sequence
  Description of Artificial Sequence: Synthetic epitope
QVFGLSALSV

SEQ ID NO: 39749 - protein, 10 aa, Artificial Sequence
  Description of Artificial Sequence: Synthetic epitope
QVFHKRAIMP

SEQ ID NO: 39750 - protein, 10 aa, Artificial Sequence
  Description of Artificial Sequence: Synthetic epitope
QVFISGIKSE

SEQ ID NO: 39751 - protein, 10 aa, Artificial Sequence
  Description of Artificial Sequence: Synthetic epitope
QVFKTSAALQ

SEQ ID NO: 39752 - protein, 10 aa, Artificial Sequence
  Description of Artificial Sequence: Synthetic epitope
QVFNGSREMP

SEQ ID NO: 39753 - protein, 10 aa, Artificial Sequence
  Description of Artificial Sequence: Synthetic epitope
QVFNSKVTSR

SEQ ID NO: 39754 - protein, 10 aa, Artificial Sequence
  Description of Artificial Sequence: Synthetic epitope
QVFSQSVMNV

SEQ ID NO: 39755 - protein, 10 aa, Artificial Sequence
  Description of Artificial Sequence: Synthetic epitope
QVGAQEVEGE

SEQ ID NO: 39756 - protein, 10 aa, Artificial Sequence
  Description of Artificial Sequence: Synthetic epitope
QVGFVLQQDQ

SEQ ID NO: 39757 - protein, 10 aa, Artificial Sequence
  Description of Artificial Sequence: Synthetic epitope
QVGIQQDVTH

SEQ ID NO: 39758 - protein, 10 aa, Artificial Sequence
  Description of Artificial Sequence: Synthetic epitope
QVGNFPTMNG

SEQ ID NO: 39759 - protein, 10 aa, Artificial Sequence
  Description of Artificial Sequence: Synthetic epitope
QVGSSKDQGS

SEQ ID NO: 39760 - protein, 10 aa, Artificial Sequence
  Description of Artificial Sequence: Synthetic epitope
QVGSSRLRHI

SEQ ID NO: 39761 - protein, 10 aa, Artificial Sequence
  Description of Artificial Sequence: Synthetic epitope
QVGTRAQSER

SEQ ID NO: 39762 - protein, 10 aa, Artificial Sequence
  Description of Artificial Sequence: Synthetic epitope
QVGTVTSLTA

SEQ ID NO: 39763 - protein, 10 aa, Artificial Sequence
  Description of Artificial Sequence: Synthetic epitope
QVGVEQAASE

SEQ ID NO: 39764 - protein, 10 aa, Artificial Sequence
  Description of Artificial Sequence: Synthetic epitope
QVHDAEALIA

SEQ ID NO: 39765 - protein, 10 aa, Artificial Sequence
  Description of Artificial Sequence: Synthetic epitope
QVHKIQTVSI

SEQ ID NO: 39766 - protein, 10 aa, Artificial Sequence
  Description of Artificial Sequence: Synthetic epitope
QVHPETKENE

SEQ ID NO: 39767 - protein, 10 aa, Artificial Sequence
  Description of Artificial Sequence: Synthetic epitope
QVHRWVNYES

SEQ ID NO: 39768 - protein, 10 aa, Artificial Sequence
  Description of Artificial Sequence: Synthetic epitope
QVIAADFKLK

SEQ ID NO: 39769 - protein, 10 aa, Artificial Sequence
  Description of Artificial Sequence: Synthetic epitope
QVIGLEKVNK

SEQ ID NO: 39770 - protein, 10 aa, Artificial Sequence
  Description of Artificial Sequence: Synthetic epitope
QVIKALKSSG

SEQ ID NO: 39771 - protein, 10 aa, Artificial Sequence
  Description of Artificial Sequence: Synthetic epitope
QVIKSASSKS

SEQ ID NO: 39772 - protein, 10 aa, Artificial Sequence
  Description of Artificial Sequence: Synthetic epitope
QVILAKASQE

SEQ ID NO: 39773 - protein, 10 aa, Artificial Sequence
  Description of Artificial Sequence: Synthetic epitope
QVILDFQFNL

SEQ ID NO: 39774 - protein, 10 aa, Artificial Sequence
  Description of Artificial Sequence: Synthetic epitope
QVILQRQQEE

SEQ ID NO: 39775 - protein, 10 aa, Artificial Sequence
  Description of Artificial Sequence: Synthetic epitope
QVIRKLVMEP

SEQ ID NO: 39776 - protein, 10 aa, Artificial Sequence
  Description of Artificial Sequence: Synthetic epitope
QVIRSVEKIE

SEQ ID NO: 39777 - protein, 10 aa, Artificial Sequence
  Description of Artificial Sequence: Synthetic epitope
QVISASSQTP

SEQ ID NO: 39778 - protein, 10 aa, Artificial Sequence
  Description of Artificial Sequence: Synthetic epitope
QVIVKNKMFS

SEQ ID NO: 39779 - protein, 10 aa, Artificial Sequence
  Description of Artificial Sequence: Synthetic epitope
QVKDEKSSKE

SEQ ID NO: 39780 - protein, 10 aa, Artificial Sequence
  Description of Artificial Sequence: Synthetic epitope
QVKISRSNSE

SEQ ID NO: 39781 - protein, 10 aa, Artificial Sequence
  Description of Artificial Sequence: Synthetic epitope
QVKKAALTQA

SEQ ID NO: 39782 - protein, 10 aa, Artificial Sequence
  Description of Artificial Sequence: Synthetic epitope
QVKLKESISS

SEQ ID NO: 39783 - protein, 10 aa, Artificial Sequence
  Description of Artificial Sequence: Synthetic epitope
QVKNSQLLNS

SEQ ID NO: 39784 - protein, 10 aa, Artificial Sequence
  Description of Artificial Sequence: Synthetic epitope
QVKPVLSKAE

SEQ ID NO: 39785 - protein, 10 aa, Artificial Sequence
  Description of Artificial Sequence: Synthetic epitope
QVKQSLQRTE

SEQ ID NO: 39786 - protein, 10 aa, Artificial Sequence
  Description of Artificial Sequence: Synthetic epitope
QVKQVEQAVQ

SEQ ID NO: 39787 - protein, 10 aa, Artificial Sequence
  Description of Artificial Sequence: Synthetic epitope
QVKRQVLLSA

SEQ ID NO: 39788 - protein, 10 aa, Artificial Sequence
  Description of Artificial Sequence: Synthetic epitope
QVKSAELTSP

SEQ ID NO: 39789 - protein, 10 aa, Artificial Sequence
  Description of Artificial Sequence: Synthetic epitope
QVKSKAKKTV

SEQ ID NO: 39790 - protein, 10 aa, Artificial Sequence
  Description of Artificial Sequence: Synthetic epitope
QVKTAKESEK

SEQ ID NO: 39791 - protein, 10 aa, Artificial Sequence
  Description of Artificial Sequence: Synthetic epitope
QVKVEELTEE

SEQ ID NO: 39792 - protein, 10 aa, Artificial Sequence
  Description of Artificial Sequence: Synthetic epitope
QVKVQDITMQ

SEQ ID NO: 39793 - protein, 10 aa, Artificial Sequence
  Description of Artificial Sequence: Synthetic epitope
QVKVVETELQ

SEQ ID NO: 39794 - protein, 10 aa, Artificial Sequence
  Description of Artificial Sequence: Synthetic epitope
QVLAINTTLT

SEQ ID NO: 39795 - protein, 10 aa, Artificial Sequence
  Description of Artificial Sequence: Synthetic epitope
QVLALLARPR

SEQ ID NO: 39796 - protein, 10 aa, Artificial Sequence
  Description of Artificial Sequence: Synthetic epitope
QVLAQLIKES

SEQ ID NO: 39797 - protein, 10 aa, Artificial Sequence
  Description of Artificial Sequence: Synthetic epitope
QVLASEAAGP

SEQ ID NO: 39798 - protein, 10 aa, Artificial Sequence
  Description of Artificial Sequence: Synthetic epitope
QVLAVEEQLE

SEQ ID NO: 39799 - protein, 10 aa, Artificial Sequence
  Description of Artificial Sequence: Synthetic epitope
QVLELDHVSE

SEQ ID NO: 39800 - protein, 10 aa, Artificial Sequence
  Description of Artificial Sequence: Synthetic epitope
QVLENSMSIT

SEQ ID NO: 39801 - protein, 10 aa, Artificial Sequence
  Description of Artificial Sequence: Synthetic epitope
QVLEQHLDMG

SEQ ID NO: 39802 - protein, 10 aa, Artificial Sequence
  Description of Artificial Sequence: Synthetic epitope
QVLFQKLSIA

SEQ ID NO: 39803 - protein, 10 aa, Artificial Sequence
  Description of Artificial Sequence: Synthetic epitope
QVLIVASKDL

SEQ ID NO: 39804 - protein, 10 aa, Artificial Sequence
  Description of Artificial Sequence: Synthetic epitope
QVLKALSFPK

SEQ ID NO: 39805 - protein, 10 aa, Artificial Sequence
  Description of Artificial Sequence: Synthetic epitope
QVLLKKPLEV

SEQ ID NO: 39806 - protein, 10 aa, Artificial Sequence
  Description of Artificial Sequence: Synthetic epitope
QVLLSQEAQL

SEQ ID NO: 39807 - protein, 10 aa, Artificial Sequence
  Description of Artificial Sequence: Synthetic epitope
QVLLVAKPSS

SEQ ID NO: 39808 - protein, 10 aa, Artificial Sequence
  Description of Artificial Sequence: Synthetic epitope
QVLNQMITSK

SEQ ID NO: 39809 - protein, 10 aa, Artificial Sequence
  Description of Artificial Sequence: Synthetic epitope
QVLQDQLQEV

SEQ ID NO: 39810 - protein, 10 aa, Artificial Sequence
  Description of Artificial Sequence: Synthetic epitope
QVLQMESHIQ

SEQ ID NO: 39811 - protein, 10 aa, Artificial Sequence
  Description of Artificial Sequence: Synthetic epitope
QVLQTRLVDA

SEQ ID NO: 39812 - protein, 10 aa, Artificial Sequence
  Description of Artificial Sequence: Synthetic epitope
QVLRNSLEGA

SEQ ID NO: 39813 - protein, 10 aa, Artificial Sequence
  Description of Artificial Sequence: Synthetic epitope
QVLSILHANP

SEQ ID NO: 39814 - protein, 10 aa, Artificial Sequence
  Description of Artificial Sequence: Synthetic epitope
QVLSKDYKAE

SEQ ID NO: 39815 - protein, 10 aa, Artificial Sequence
  Description of Artificial Sequence: Synthetic epitope
QVLSQQANQE

SEQ ID NO: 39816 - protein, 10 aa, Artificial Sequence
  Description of Artificial Sequence: Synthetic epitope
QVLSRSTTMN

SEQ ID NO: 39817 - protein, 10 aa, Artificial Sequence
  Description of Artificial Sequence: Synthetic epitope
QVLSSTLSSA

SEQ ID NO: 39818 - protein, 10 aa, Artificial Sequence
  Description of Artificial Sequence: Synthetic epitope
QVLVEIDQVK

SEQ ID NO: 39819 - protein, 10 aa, Artificial Sequence
  Description of Artificial Sequence: Synthetic epitope
QVLVMMNGVQ

SEQ ID NO: 39820 - protein, 10 aa, Artificial Sequence
  Description of Artificial Sequence: Synthetic epitope
QVMPLQFSKE

SEQ ID NO: 39821 - protein, 10 aa, Artificial Sequence
  Description of Artificial Sequence: Synthetic epitope
QVMQEELHAQ

SEQ ID NO: 39822 - protein, 10 aa, Artificial Sequence
  Description of Artificial Sequence: Synthetic epitope
QVMQMKLHIV

SEQ ID NO: 39823 - protein, 10 aa, Artificial Sequence
  Description of Artificial Sequence: Synthetic epitope
QVMRAQMNQI

SEQ ID NO: 39824 - protein, 10 aa, Artificial Sequence
  Description of Artificial Sequence: Synthetic epitope
QVMSLELEDA

SEQ ID NO: 39825 - protein, 10 aa, Artificial Sequence
  Description of Artificial Sequence: Synthetic epitope
QVMYAERWGL

SEQ ID NO: 39826 - protein, 10 aa, Artificial Sequence
  Description of Artificial Sequence: Synthetic epitope
QVNASRTRIT

SEQ ID NO: 39827 - protein, 10 aa, Artificial Sequence
  Description of Artificial Sequence: Synthetic epitope
QVNEKSLIRQ

SEQ ID NO: 39828 - protein, 10 aa, Artificial Sequence
  Description of Artificial Sequence: Synthetic epitope
QVNKDKGRPS

SEQ ID NO: 39829 - protein, 10 aa, Artificial Sequence
  Description of Artificial Sequence: Synthetic epitope
QVNKLWYKPV

SEQ ID NO: 39830 - protein, 10 aa, Artificial Sequence
  Description of Artificial Sequence: Synthetic epitope
QVNKTAQLDT

SEQ ID NO: 39831 - protein, 10 aa, Artificial Sequence
  Description of Artificial Sequence: Synthetic epitope
QVNKTLNLSS

SEQ ID NO: 39832 - protein, 10 aa, Artificial Sequence
  Description of Artificial Sequence: Synthetic epitope
QVNQFQGSPQ

SEQ ID NO: 39833 - protein, 10 aa, Artificial Sequence
  Description of Artificial Sequence: Synthetic epitope
QVNQLKTSMQ

SEQ ID NO: 39834 - protein, 10 aa, Artificial Sequence
  Description of Artificial Sequence: Synthetic epitope
QVNQSATALK

SEQ ID NO: 39835 - protein, 10 aa, Artificial Sequence
  Description of Artificial Sequence: Synthetic epitope
QVNRRLESLQ

SEQ ID NO: 39836 - protein, 10 aa, Artificial Sequence
  Description of Artificial Sequence: Synthetic epitope
QVNSAGSLTS

SEQ ID NO: 39837 - protein, 10 aa, Artificial Sequence
  Description of Artificial Sequence: Synthetic epitope
QVNTIKNEAE

SEQ ID NO: 39838 - protein, 10 aa, Artificial Sequence
  Description of Artificial Sequence: Synthetic epitope
QVNTPLVGAS

SEQ ID NO: 39839 - protein, 10 aa, Artificial Sequence
  Description of Artificial Sequence: Synthetic epitope
QVPAFLLQSN

SEQ ID NO: 39840 - protein, 10 aa, Artificial Sequence
  Description of Artificial Sequence: Synthetic epitope
QVPGQVAIQQ

SEQ ID NO: 39841 - protein, 10 aa, Artificial Sequence
  Description of Artificial Sequence: Synthetic epitope
QVPLTKDQSH

SEQ ID NO: 39842 - protein, 10 aa, Artificial Sequence
  Description of Artificial Sequence: Synthetic epitope
QVPQRKLFSM

SEQ ID NO: 39843 - protein, 10 aa, Artificial Sequence
  Description of Artificial Sequence: Synthetic epitope
QVQASKQEIT

SEQ ID NO: 39844 - protein, 10 aa, Artificial Sequence
  Description of Artificial Sequence: Synthetic epitope
QVQDVVLKDE

SEQ ID NO: 39845 - protein, 10 aa, Artificial Sequence
  Description of Artificial Sequence: Synthetic epitope
QVQESALQAQ

SEQ ID NO: 39846 - protein, 10 aa, Artificial Sequence
  Description of Artificial Sequence: Synthetic epitope
QVQKDARIGE

SEQ ID NO: 39847 - protein, 10 aa, Artificial Sequence
  Description of Artificial Sequence: Synthetic epitope
QVQKSRARSS

SEQ ID NO: 39848 - protein, 10 aa, Artificial Sequence
  Description of Artificial Sequence: Synthetic epitope
QVQLFLAKVP

SEQ ID NO: 39849 - protein, 10 aa, Artificial Sequence
  Description of Artificial Sequence: Synthetic epitope
QVQLQQEAEP

SEQ ID NO: 39850 - protein, 10 aa, Artificial Sequence
  Description of Artificial Sequence: Synthetic epitope
QVQLRSRRLE

SEQ ID NO: 39851 - protein, 10 aa, Artificial Sequence
  Description of Artificial Sequence: Synthetic epitope
QVQNAGLSQQ

SEQ ID NO: 39852 - protein, 10 aa, Artificial Sequence
  Description of Artificial Sequence: Synthetic epitope
QVQNIKKDQT

SEQ ID NO: 39853 - protein, 10 aa, Artificial Sequence
  Description of Artificial Sequence: Synthetic epitope
QVQNPQAQTI

SEQ ID NO: 39854 - protein, 10 aa, Artificial Sequence
  Description of Artificial Sequence: Synthetic epitope
QVQQHSKRTE

SEQ ID NO: 39855 - protein, 10 aa, Artificial Sequence
  Description of Artificial Sequence: Synthetic epitope
QVQRSLQAVP

SEQ ID NO: 39856 - protein, 10 aa, Artificial Sequence
  Description of Artificial Sequence: Synthetic epitope
QVQSPSIKMS

SEQ ID NO: 39857 - protein, 10 aa, Artificial Sequence
  Description of Artificial Sequence: Synthetic epitope
QVQSQILESS

SEQ ID NO: 39858 - protein, 10 aa, Artificial Sequence
  Description of Artificial Sequence: Synthetic epitope
QVQSSEASFT

SEQ ID NO: 39859 - protein, 10 aa, Artificial Sequence
  Description of Artificial Sequence: Synthetic epitope
QVQTKPTSVE

SEQ ID NO: 39860 - protein, 10 aa, Artificial Sequence
  Description of Artificial Sequence: Synthetic epitope
QVQTVQAQRV

SEQ ID NO: 39861 - protein, 10 aa, Artificial Sequence
  Description of Artificial Sequence: Synthetic epitope
QVQVQKDSKE

SEQ ID NO: 39862 - protein, 10 aa, Artificial Sequence
  Description of Artificial Sequence: Synthetic epitope
QVRAEATTRS

SEQ ID NO: 39863 - protein, 10 aa, Artificial Sequence
  Description of Artificial Sequence: Synthetic epitope
QVRARVQLQG

SEQ ID NO: 39864 - protein, 10 aa, Artificial Sequence
  Description of Artificial Sequence: Synthetic epitope
QVRGEALSEE

SEQ ID NO: 39865 - protein, 10 aa, Artificial Sequence
  Description of Artificial Sequence: Synthetic epitope
QVRIKASQSA

SEQ ID NO: 39866 - protein, 10 aa, Artificial Sequence
  Description of Artificial Sequence: Synthetic epitope
QVRQRSPDIF

SEQ ID NO: 39867 - protein, 10 aa, Artificial Sequence
  Description of Artificial Sequence: Synthetic epitope
QVRQVGLLAA

SEQ ID NO: 39868 - protein, 10 aa, Artificial Sequence
  Description of Artificial Sequence: Synthetic epitope
QVRRAVASVV

SEQ ID NO: 39869 - protein, 10 aa, Artificial Sequence
  Description of Artificial Sequence: Synthetic epitope
QVRSAAQQST

SEQ ID NO: 39870 - protein, 10 aa, Artificial Sequence
  Description of Artificial Sequence: Synthetic epitope
QVRSMISQGK

SEQ ID NO: 39871 - protein, 10 aa, Artificial Sequence
  Description of Artificial Sequence: Synthetic epitope
QVRSSVRARR

SEQ ID NO: 39872 - protein, 10 aa, Artificial Sequence
  Description of Artificial Sequence: Synthetic epitope
QVRVQVSDPE

SEQ ID NO: 39873 - protein, 10 aa, Artificial Sequence
  Description of Artificial Sequence: Synthetic epitope
QVRVSTPSAE

SEQ ID NO: 39874 - protein, 10 aa, Artificial Sequence
  Description of Artificial Sequence: Synthetic epitope
QVSAHQEAGS

SEQ ID NO: 39875 - protein, 10 aa, Artificial Sequence
  Description of Artificial Sequence: Synthetic epitope
QVSASNSFSR

SEQ ID NO: 39876 - protein, 10 aa, Artificial Sequence
  Description of Artificial Sequence: Synthetic epitope
QVSDVHFPWE

SEQ ID NO: 39877 - protein, 10 aa, Artificial Sequence
  Description of Artificial Sequence: Synthetic epitope
QVSEENQKQL

SEQ ID NO: 39878 - protein, 10 aa, Artificial Sequence
  Description of Artificial Sequence: Synthetic epitope
QVSETSHTLQ

SEQ ID NO: 39879 - protein, 10 aa, Artificial Sequence
  Description of Artificial Sequence: Synthetic epitope
QVSFHQAISV

SEQ ID NO: 39880 - protein, 10 aa, Artificial Sequence
  Description of Artificial Sequence: Synthetic epitope
QVSGEAIKMF

SEQ ID NO: 39881 - protein, 10 aa, Artificial Sequence
  Description of Artificial Sequence: Synthetic epitope
QVSGLEMRKW

SEQ ID NO: 39882 - protein, 10 aa, Artificial Sequence
  Description of Artificial Sequence: Synthetic epitope
QVSHTLFYDD

SEQ ID NO: 39883 - protein, 10 aa, Artificial Sequence
  Description of Artificial Sequence: Synthetic epitope
QVSKKRLISV

SEQ ID NO: 39884 - protein, 10 aa, Artificial Sequence
  Description of Artificial Sequence: Synthetic epitope
QVSLNTSQSE

SEQ ID NO: 39885 - protein, 10 aa, Artificial Sequence
  Description of Artificial Sequence: Synthetic epitope
QVSMETQESS

SEQ ID NO: 39886 - protein, 10 aa, Artificial Sequence
  Description of Artificial Sequence: Synthetic epitope
QVSNLMAPAP

SEQ ID NO: 39887 - protein, 10 aa, Artificial Sequence
  Description of Artificial Sequence: Synthetic epitope
QVSPAVDSDL

SEQ ID NO: 39888 - protein, 10 aa, Artificial Sequence
  Description of Artificial Sequence: Synthetic epitope
QVSPAVDSDL

SEQ ID NO: 39889 - protein, 10 aa, Artificial Sequence
  Description of Artificial Sequence: Synthetic epitope
QVSQFKMVNY

SEQ ID NO: 39890 - protein, 10 aa, Artificial Sequence
  Description of Artificial Sequence: Synthetic epitope
QVSQSRMLPE

SEQ ID NO: 39891 - protein, 10 aa, Artificial Sequence
  Description of Artificial Sequence: Synthetic epitope
QVSQTNSDVE

SEQ ID NO: 39892 - protein, 10 aa, Artificial Sequence
  Description of Artificial Sequence: Synthetic epitope
QVSRLASPLP

SEQ ID NO: 39893 - protein, 10 aa, Artificial Sequence
  Description of Artificial Sequence: Synthetic epitope
QVSRRISFSA

SEQ ID NO: 39894 - protein, 10 aa, Artificial Sequence
  Description of Artificial Sequence: Synthetic epitope
QVSSKTITQR

SEQ ID NO: 39895 - protein, 10 aa, Artificial Sequence
  Description of Artificial Sequence: Synthetic epitope
QVSSLLQSIL

SEQ ID NO: 39896 - protein, 10 aa, Artificial Sequence
  Description of Artificial Sequence: Synthetic epitope
QVSSRKSTLQ

SEQ ID NO: 39897 - protein, 10 aa, Artificial Sequence
  Description of Artificial Sequence: Synthetic epitope
QVSTLNSYRN

SEQ ID NO: 39898 - protein, 10 aa, Artificial Sequence
  Description of Artificial Sequence: Synthetic epitope
QVSTMVTTST

SEQ ID NO: 39899 - protein, 10 aa, Artificial Sequence
  Description of Artificial Sequence: Synthetic epitope
QVSTSVHSYS

SEQ ID NO: 39900 - protein, 10 aa, Artificial Sequence
  Description of Artificial Sequence: Synthetic epitope
QVSVEGTNQT

SEQ ID NO: 39901 - protein, 10 aa, Artificial Sequence
  Description of Artificial Sequence: Synthetic epitope
QVSVKGQDKV

SEQ ID NO: 39902 - protein, 10 aa, Artificial Sequence
  Description of Artificial Sequence: Synthetic epitope
QVSVKTQVSV

SEQ ID NO: 39903 - protein, 10 aa, Artificial Sequence
  Description of Artificial Sequence: Synthetic epitope
QVTAKLQDKQ

SEQ ID NO: 39904 - protein, 10 aa, Artificial Sequence
  Description of Artificial Sequence: Synthetic epitope
QVTAVAQQNQ

SEQ ID NO: 39905 - protein, 10 aa, Artificial Sequence
  Description of Artificial Sequence: Synthetic epitope
QVTEAVSAEA

SEQ ID NO: 39906 - protein, 10 aa, Artificial Sequence
  Description of Artificial Sequence: Synthetic epitope
QVTEVTATEE

SEQ ID NO: 39907 - protein, 10 aa, Artificial Sequence
  Description of Artificial Sequence: Synthetic epitope
QVTFNFTSFK

SEQ ID NO: 39908 - protein, 10 aa, Artificial Sequence
  Description of Artificial Sequence: Synthetic epitope
QVTHKVAQHL

SEQ ID NO: 39909 - protein, 10 aa, Artificial Sequence
  Description of Artificial Sequence: Synthetic epitope
QVTKAEAELG

SEQ ID NO: 39910 - protein, 10 aa, Artificial Sequence
  Description of Artificial Sequence: Synthetic epitope
QVTLNDIQLQ

SEQ ID NO: 39911 - protein, 10 aa, Artificial Sequence
  Description of Artificial Sequence: Synthetic epitope
QVTLTESGPA

SEQ ID NO: 39912 - protein, 10 aa, Artificial Sequence
  Description of Artificial Sequence: Synthetic epitope
QVTQRASRRS

SEQ ID NO: 39913 - protein, 10 aa, Artificial Sequence
  Description of Artificial Sequence: Synthetic epitope
QVTRTRFSTR

SEQ ID NO: 39914 - protein, 10 aa, Artificial Sequence
  Description of Artificial Sequence: Synthetic epitope
QVTSESQEEP

SEQ ID NO: 39915 - protein, 10 aa, Artificial Sequence
  Description of Artificial Sequence: Synthetic epitope
QVTSKAFQHD

SEQ ID NO: 39916 - protein, 10 aa, Artificial Sequence
  Description of Artificial Sequence: Synthetic epitope
QVTSLSPINE

SEQ ID NO: 39917 - protein, 10 aa, Artificial Sequence
  Description of Artificial Sequence: Synthetic epitope
QVTSSIERAV

SEQ ID NO: 39918 - protein, 10 aa, Artificial Sequence
  Description of Artificial Sequence: Synthetic epitope
QVTSSQSVRG

SEQ ID NO: 39919 - protein, 10 aa, Artificial Sequence
  Description of Artificial Sequence: Synthetic epitope
QVTTAENLKD

SEQ ID NO: 39920 - protein, 10 aa, Artificial Sequence
  Description of Artificial Sequence: Synthetic epitope
QVTTSVTHAP

SEQ ID NO: 39921 - protein, 10 aa, Artificial Sequence
  Description of Artificial Sequence: Synthetic epitope
QVVAAYEKLS

SEQ ID NO: 39922 - protein, 10 aa, Artificial Sequence
  Description of Artificial Sequence: Synthetic epitope
QVVEISSLTE

SEQ ID NO: 39923 - protein, 10 aa, Artificial Sequence
  Description of Artificial Sequence: Synthetic epitope
QVVLDSKLDL

SEQ ID NO: 39924 - protein, 10 aa, Artificial Sequence
  Description of Artificial Sequence: Synthetic epitope
QVVLKRLFMS

SEQ ID NO: 39925 - protein, 10 aa, Artificial Sequence
  Description of Artificial Sequence: Synthetic epitope
QVVMAVADTS

SEQ ID NO: 39926 - protein, 10 aa, Artificial Sequence
  Description of Artificial Sequence: Synthetic epitope
QVVNAKKNAI

SEQ ID NO: 39927 - protein, 10 aa, Artificial Sequence
  Description of Artificial Sequence: Synthetic epitope
QVVPISKKVA

SEQ ID NO: 39928 - protein, 10 aa, Artificial Sequence
  Description of Artificial Sequence: Synthetic epitope
QVVQEQALST

SEQ ID NO: 39929 - protein, 10 aa, Artificial Sequence
  Description of Artificial Sequence: Synthetic epitope
QVVQERESLL

SEQ ID NO: 39930 - protein, 10 aa, Artificial Sequence
  Description of Artificial Sequence: Synthetic epitope
QVVRSALANQ

SEQ ID NO: 39931 - protein, 10 aa, Artificial Sequence
  Description of Artificial Sequence: Synthetic epitope
QVVRSLVKPE

SEQ ID NO: 39932 - protein, 10 aa, Artificial Sequence
  Description of Artificial Sequence: Synthetic epitope
QVVSKNLYSQ

SEQ ID NO: 39933 - protein, 10 aa, Artificial Sequence
  Description of Artificial Sequence: Synthetic epitope
QVWLNISAEI

SEQ ID NO: 39934 - protein, 10 aa, Artificial Sequence
  Description of Artificial Sequence: Synthetic epitope
QVYIGHSEPV

SEQ ID NO: 39935 - protein, 10 aa, Artificial Sequence
  Description of Artificial Sequence: Synthetic epitope
QVYQITGPVE

SEQ ID NO: 39936 - protein, 10 aa, Artificial Sequence
  Description of Artificial Sequence: Synthetic epitope
QVYQKDKQDA

SEQ ID NO: 39937 - protein, 10 aa, Artificial Sequence
  Description of Artificial Sequence: Synthetic epitope
QVYQTDKKYF

SEQ ID NO: 39938 - protein, 10 aa, Artificial Sequence
  Description of Artificial Sequence: Synthetic epitope
QWAIQMEKKA

SEQ ID NO: 39939 - protein, 10 aa, Artificial Sequence
  Description of Artificial Sequence: Synthetic epitope
QWALTNEQPH

SEQ ID NO: 39940 - protein, 10 aa, Artificial Sequence
  Description of Artificial Sequence: Synthetic epitope
QWASASAKSE

SEQ ID NO: 39941 - protein, 10 aa, Artificial Sequence
  Description of Artificial Sequence: Synthetic epitope
QWEAGKKPAA

SEQ ID NO: 39942 - protein, 10 aa, Artificial Sequence
  Description of Artificial Sequence: Synthetic epitope
QWEEGSGMTE

SEQ ID NO: 39943 - protein, 10 aa, Artificial Sequence
  Description of Artificial Sequence: Synthetic epitope
QWFDSRSSDS

SEQ ID NO: 39944 - protein, 10 aa, Artificial Sequence
  Description of Artificial Sequence: Synthetic epitope
QWHSLRSRAE

SEQ ID NO: 39945 - protein, 10 aa, Artificial Sequence
  Description of Artificial Sequence: Synthetic epitope
QWLAMTASEK

SEQ ID NO: 39946 - protein, 10 aa, Artificial Sequence
  Description of Artificial Sequence: Synthetic epitope
QWLEHVQQED

SEQ ID NO: 39947 - protein, 10 aa, Artificial Sequence
  Description of Artificial Sequence: Synthetic epitope
QWLQKKMSEH

SEQ ID NO: 39948 - protein, 10 aa, Artificial Sequence
  Description of Artificial Sequence: Synthetic epitope
QWLSRGGEIE

SEQ ID NO: 39949 - protein, 10 aa, Artificial Sequence
  Description of Artificial Sequence: Synthetic epitope
QWMEEKGLMA

SEQ ID NO: 39950 - protein, 10 aa, Artificial Sequence
  Description of Artificial Sequence: Synthetic epitope
QWNIKKNQET

SEQ ID NO: 39951 - protein, 10 aa, Artificial Sequence
  Description of Artificial Sequence: Synthetic epitope
QWNLEHATLN

SEQ ID NO: 39952 - protein, 10 aa, Artificial Sequence
  Description of Artificial Sequence: Synthetic epitope
QWQAISLTVI

SEQ ID NO: 39953 - protein, 10 aa, Artificial Sequence
  Description of Artificial Sequence: Synthetic epitope
QWQAISLTVI

SEQ ID NO: 39954 - protein, 10 aa, Artificial Sequence
  Description of Artificial Sequence: Synthetic epitope
QWQNVVAQIK

SEQ ID NO: 39955 - protein, 10 aa, Artificial Sequence
  Description of Artificial Sequence: Synthetic epitope
QWRAQATPDH

SEQ ID NO: 39956 - protein, 10 aa, Artificial Sequence
  Description of Artificial Sequence: Synthetic epitope
QWREFLVKYS

SEQ ID NO: 39957 - protein, 10 aa, Artificial Sequence
  Description of Artificial Sequence: Synthetic epitope
QWRPESKSGL

SEQ ID NO: 39958 - protein, 10 aa, Artificial Sequence
  Description of Artificial Sequence: Synthetic epitope
QWRPVAYSQK

SEQ ID NO: 39959 - protein, 10 aa, Artificial Sequence
  Description of Artificial Sequence: Synthetic epitope
QWSESTAAKY

SEQ ID NO: 39960 - protein, 10 aa, Artificial Sequence
  Description of Artificial Sequence: Synthetic epitope
QWSKWKKRMG

SEQ ID NO: 39961 - protein, 10 aa, Artificial Sequence
  Description of Artificial Sequence: Synthetic epitope
QWSLISFKYT

SEQ ID NO: 39962 - protein, 10 aa, Artificial Sequence
  Description of Artificial Sequence: Synthetic epitope
QWVASTASEK

SEQ ID NO: 39963 - protein, 10 aa, Artificial Sequence
  Description of Artificial Sequence: Synthetic epitope
QWVGDPRWKD

SEQ ID NO: 39964 - protein, 10 aa, Artificial Sequence
  Description of Artificial Sequence: Synthetic epitope
QWVSVVSLQL

SEQ ID NO: 39965 - protein, 10 aa, Artificial Sequence
  Description of Artificial Sequence: Synthetic epitope
QYAPQLAEAL

SEQ ID NO: 39966 - protein, 10 aa, Artificial Sequence
  Description of Artificial Sequence: Synthetic epitope
QYARVAMAMG

SEQ ID NO: 39967 - protein, 10 aa, Artificial Sequence
  Description of Artificial Sequence: Synthetic epitope
QYASLLSQLQ

SEQ ID NO: 39968 - protein, 10 aa, Artificial Sequence
  Description of Artificial Sequence: Synthetic epitope
QYASNAWFAA

SEQ ID NO: 39969 - protein, 10 aa, Artificial Sequence
  Description of Artificial Sequence: Synthetic epitope
QYASQAQMAQ

SEQ ID NO: 39970 - protein, 10 aa, Artificial Sequence
  Description of Artificial Sequence: Synthetic epitope
QYAYLSDRSS

SEQ ID NO: 39971 - protein, 10 aa, Artificial Sequence
  Description of Artificial Sequence: Synthetic epitope
QYDANPFLQS

SEQ ID NO: 39972 - protein, 10 aa, Artificial Sequence
  Description of Artificial Sequence: Synthetic epitope
QYDELEAEYD

SEQ ID NO: 39973 - protein, 10 aa, Artificial Sequence
  Description of Artificial Sequence: Synthetic epitope
QYDKDTKPNP

SEQ ID NO: 39974 - protein, 10 aa, Artificial Sequence
  Description of Artificial Sequence: Synthetic epitope
QYDSYDVKSG

SEQ ID NO: 39975 - protein, 10 aa, Artificial Sequence
  Description of Artificial Sequence: Synthetic epitope
QYDVSSAAQP

SEQ ID NO: 39976 - protein, 10 aa, Artificial Sequence
  Description of Artificial Sequence: Synthetic epitope
QYEAMQERRE

SEQ ID NO: 39977 - protein, 10 aa, Artificial Sequence
  Description of Artificial Sequence: Synthetic epitope
QYEENQTLED

SEQ ID NO: 39978 - protein, 10 aa, Artificial Sequence
  Description of Artificial Sequence: Synthetic epitope
QYEQDISTKE

SEQ ID NO: 39979 - protein, 10 aa, Artificial Sequence
  Description of Artificial Sequence: Synthetic epitope
QYEYESTVSV

SEQ ID NO: 39980 - protein, 10 aa, Artificial Sequence
  Description of Artificial Sequence: Synthetic epitope
QYFADTLTAV

SEQ ID NO: 39981 - protein, 10 aa, Artificial Sequence
  Description of Artificial Sequence: Synthetic epitope
QYFAEPMMLD

SEQ ID NO: 39982 - protein, 10 aa, Artificial Sequence
  Description of Artificial Sequence: Synthetic epitope
QYFLKVKNQM

SEQ ID NO: 39983 - protein, 10 aa, Artificial Sequence
  Description of Artificial Sequence: Synthetic epitope
QYFRGQQHAS

SEQ ID NO: 39984 - protein, 10 aa, Artificial Sequence
  Description of Artificial Sequence: Synthetic epitope
QYFSSQMIVK

SEQ ID NO: 39985 - protein, 10 aa, Artificial Sequence
  Description of Artificial Sequence: Synthetic epitope
QYFYPMVLKK

SEQ ID NO: 39986 - protein, 10 aa, Artificial Sequence
  Description of Artificial Sequence: Synthetic epitope
QYGDHLEASS

SEQ ID NO: 39987 - protein, 10 aa, Artificial Sequence
  Description of Artificial Sequence: Synthetic epitope
QYGTKVKHNS

SEQ ID NO: 39988 - protein, 10 aa, Artificial Sequence
  Description of Artificial Sequence: Synthetic epitope
QYHNLSKQQN

SEQ ID NO: 39989 - protein, 10 aa, Artificial Sequence
  Description of Artificial Sequence: Synthetic epitope
QYHRQIFYRT

SEQ ID NO: 39990 - protein, 10 aa, Artificial Sequence
  Description of Artificial Sequence: Synthetic epitope
QYHSDIASVS

SEQ ID NO: 39991 - protein, 10 aa, Artificial Sequence
  Description of Artificial Sequence: Synthetic epitope
QYHSPIRNKS

SEQ ID NO: 39992 - protein, 10 aa, Artificial Sequence
  Description of Artificial Sequence: Synthetic epitope
QYHTKTGILN

SEQ ID NO: 39993 - protein, 10 aa, Artificial Sequence
  Description of Artificial Sequence: Synthetic epitope
QYHTVAGNDI

SEQ ID NO: 39994 - protein, 10 aa, Artificial Sequence
  Description of Artificial Sequence: Synthetic epitope
QYHVARARKQ

SEQ ID NO: 39995 - protein, 10 aa, Artificial Sequence
  Description of Artificial Sequence: Synthetic epitope
QYIQAQAREP

SEQ ID NO: 39996 - protein, 10 aa, Artificial Sequence
  Description of Artificial Sequence: Synthetic epitope
QYIVAEFEQG

SEQ ID NO: 39997 - protein, 10 aa, Artificial Sequence
  Description of Artificial Sequence: Synthetic epitope
QYKAMQAAGQ

SEQ ID NO: 39998 - protein, 10 aa, Artificial Sequence
  Description of Artificial Sequence: Synthetic epitope
QYKGPIQYMV

SEQ ID NO: 39999 - protein, 10 aa, Artificial Sequence
  Description of Artificial Sequence: Synthetic epitope
QYKHQMLHHQ

SEQ ID NO: 40000 - protein, 10 aa, Artificial Sequence
  Description of Artificial Sequence: Synthetic epitope
QYKLKASAIS

SEQ ID NO: 40001 - protein, 10 aa, Artificial Sequence
  Description of Artificial Sequence: Synthetic epitope
QYLAQASEVL

SEQ ID NO: 40002 - protein, 10 aa, Artificial Sequence
  Description of Artificial Sequence: Synthetic epitope
QYLAVLNLSR

SEQ ID NO: 40003 - protein, 10 aa, Artificial Sequence
  Description of Artificial Sequence: Synthetic epitope
QYLERLYMKR

SEQ ID NO: 40004 - protein, 10 aa, Artificial Sequence
  Description of Artificial Sequence: Synthetic epitope
QYLKTKKTEA

SEQ ID NO: 40005 - protein, 10 aa, Artificial Sequence
  Description of Artificial Sequence: Synthetic epitope
QYLLKMVAKQ

SEQ ID NO: 40006 - protein, 10 aa, Artificial Sequence
  Description of Artificial Sequence: Synthetic epitope
QYLLTSNFSI

SEQ ID NO: 40007 - protein, 10 aa, Artificial Sequence
  Description of Artificial Sequence: Synthetic epitope
QYLSKIKIQQ

SEQ ID NO: 40008 - protein, 10 aa, Artificial Sequence
  Description of Artificial Sequence: Synthetic epitope
QYLSQVLKES

SEQ ID NO: 40009 - protein, 10 aa, Artificial Sequence
  Description of Artificial Sequence: Synthetic epitope
QYMAGLLAPP

SEQ ID NO: 40010 - protein, 10 aa, Artificial Sequence
  Description of Artificial Sequence: Synthetic epitope
QYMGMSVPPH

SEQ ID NO: 40011 - protein, 10 aa, Artificial Sequence
  Description of Artificial Sequence: Synthetic epitope
QYNLKTFEMS

SEQ ID NO: 40012 - protein, 10 aa, Artificial Sequence
  Description of Artificial Sequence: Synthetic epitope
QYPVKSEGKE

SEQ ID NO: 40013 - protein, 10 aa, Artificial Sequence
  Description of Artificial Sequence: Synthetic epitope
QYQDNSKITR

SEQ ID NO: 40014 - protein, 10 aa, Artificial Sequence
  Description of Artificial Sequence: Synthetic epitope
QYQFTGIKKY

SEQ ID NO: 40015 - protein, 10 aa, Artificial Sequence
  Description of Artificial Sequence: Synthetic epitope
QYQIKMKGNM

SEQ ID NO: 40016 - protein, 10 aa, Artificial Sequence
  Description of Artificial Sequence: Synthetic epitope
QYQLKGLLKK

SEQ ID NO: 40017 - protein, 10 aa, Artificial Sequence
  Description of Artificial Sequence: Synthetic epitope
QYQMALSPPA

SEQ ID NO: 40018 - protein, 10 aa, Artificial Sequence
  Description of Artificial Sequence: Synthetic epitope
QYQMDSKYPR

SEQ ID NO: 40019 - protein, 10 aa, Artificial Sequence
  Description of Artificial Sequence: Synthetic epitope
QYQNRVRDTH

SEQ ID NO: 40020 - protein, 10 aa, Artificial Sequence
  Description of Artificial Sequence: Synthetic epitope
QYQNTTVSFS

SEQ ID NO: 40021 - protein, 10 aa, Artificial Sequence
  Description of Artificial Sequence: Synthetic epitope
QYQQSLQEAI

SEQ ID NO: 40022 - protein, 10 aa, Artificial Sequence
  Description of Artificial Sequence: Synthetic epitope
QYQSRAQINH

SEQ ID NO: 40023 - protein, 10 aa, Artificial Sequence
  Description of Artificial Sequence: Synthetic epitope
QYRASAPNSH

SEQ ID NO: 40024 - protein, 10 aa, Artificial Sequence
  Description of Artificial Sequence: Synthetic epitope
QYRKKDELQQ

SEQ ID NO: 40025 - protein, 10 aa, Artificial Sequence
  Description of Artificial Sequence: Synthetic epitope
QYRKVKAPAA

SEQ ID NO: 40026 - protein, 10 aa, Artificial Sequence
  Description of Artificial Sequence: Synthetic epitope
QYRLASQVKE

SEQ ID NO: 40027 - protein, 10 aa, Artificial Sequence
  Description of Artificial Sequence: Synthetic epitope
QYRLNSLKEE

SEQ ID NO: 40028 - protein, 10 aa, Artificial Sequence
  Description of Artificial Sequence: Synthetic epitope
QYRRQNQQSS

SEQ ID NO: 40029 - protein, 10 aa, Artificial Sequence
  Description of Artificial Sequence: Synthetic epitope
QYRTSQPIKA

SEQ ID NO: 40030 - protein, 10 aa, Artificial Sequence
  Description of Artificial Sequence: Synthetic epitope
QYSDVLSTTH

SEQ ID NO: 40031 - protein, 10 aa, Artificial Sequence
  Description of Artificial Sequence: Synthetic epitope
QYSELQVDIQ

SEQ ID NO: 40032 - protein, 10 aa, Artificial Sequence
  Description of Artificial Sequence: Synthetic epitope
QYSHHSSVQD

SEQ ID NO: 40033 - protein, 10 aa, Artificial Sequence
  Description of Artificial Sequence: Synthetic epitope
QYSKGVSQMP

SEQ ID NO: 40034 - protein, 10 aa, Artificial Sequence
  Description of Artificial Sequence: Synthetic epitope
QYSLRIKSNK

SEQ ID NO: 40035 - protein, 10 aa, Artificial Sequence
  Description of Artificial Sequence: Synthetic epitope
QYSQKDLDAV

SEQ ID NO: 40036 - protein, 10 aa, Artificial Sequence
  Description of Artificial Sequence: Synthetic epitope
QYSSADSMTI

SEQ ID NO: 40037 - protein, 10 aa, Artificial Sequence
  Description of Artificial Sequence: Synthetic epitope
QYSSAMLESL

SEQ ID NO: 40038 - protein, 10 aa, Artificial Sequence
  Description of Artificial Sequence: Synthetic epitope
QYSTSSQSTF

SEQ ID NO: 40039 - protein, 10 aa, Artificial Sequence
  Description of Artificial Sequence: Synthetic epitope
QYTKEMKESA

SEQ ID NO: 40040 - protein, 10 aa, Artificial Sequence
  Description of Artificial Sequence: Synthetic epitope
QYTQKRRYKQ

SEQ ID NO: 40041 - protein, 10 aa, Artificial Sequence
  Description of Artificial Sequence: Synthetic epitope
QYTRKAEFRK

SEQ ID NO: 40042 - protein, 10 aa, Artificial Sequence
  Description of Artificial Sequence: Synthetic epitope
QYTSAHTPAK

SEQ ID NO: 40043 - protein, 10 aa, Artificial Sequence
  Description of Artificial Sequence: Synthetic epitope
QYTTSSKPSV

SEQ ID NO: 40044 - protein, 10 aa, Artificial Sequence
  Description of Artificial Sequence: Synthetic epitope
QYTWDMAKHG

SEQ ID NO: 40045 - protein, 10 aa, Artificial Sequence
  Description of Artificial Sequence: Synthetic epitope
QYTYVALSSL

SEQ ID NO: 40046 - protein, 10 aa, Artificial Sequence
  Description of Artificial Sequence: Synthetic epitope
QYVDFVMSSV

SEQ ID NO: 40047 - protein, 10 aa, Artificial Sequence
  Description of Artificial Sequence: Synthetic epitope
QYVDVTAKTI

SEQ ID NO: 40048 - protein, 10 aa, Artificial Sequence
  Description of Artificial Sequence: Synthetic epitope
QYVGTEGASS

SEQ ID NO: 40049 - protein, 10 aa, Artificial Sequence
  Description of Artificial Sequence: Synthetic epitope
QYVKFAVQDV

SEQ ID NO: 40050 - protein, 10 aa, Artificial Sequence
  Description of Artificial Sequence: Synthetic epitope
QYVKIKDVAR

SEQ ID NO: 40051 - protein, 10 aa, Artificial Sequence
  Description of Artificial Sequence: Synthetic epitope
QYVSQAEASA

SEQ ID NO: 40052 - protein, 10 aa, Artificial Sequence
  Description of Artificial Sequence: Synthetic epitope
QYYGMTEMNY

SEQ ID NO: 40053 - protein, 10 aa, Artificial Sequence
  Description of Artificial Sequence: Synthetic epitope
QYYKTSDTNT

SEQ ID NO: 40054 - protein, 10 aa, Artificial Sequence
  Description of Artificial Sequence: Synthetic epitope
QYYQYSSNNP

SEQ ID NO: 40055 - protein, 10 aa, Artificial Sequence
  Description of Artificial Sequence: Synthetic epitope
QYYRKSSVSS

SEQ ID NO: 40056 - protein, 10 aa, Artificial Sequence
  Description of Artificial Sequence: Synthetic epitope
QYYSLDHQPG

SEQ ID NO: 40057 - protein, 10 aa, Artificial Sequence
  Description of Artificial Sequence: Synthetic epitope
QYYVRKVLEL

SEQ ID NO: 40058 - protein, 10 aa, Artificial Sequence
  Description of Artificial Sequence: Synthetic epitope
RAAEGVQEVS

SEQ ID NO: 40059 - protein, 10 aa, Artificial Sequence
  Description of Artificial Sequence: Synthetic epitope
RAAERNVRRK

SEQ ID NO: 40060 - protein, 10 aa, Artificial Sequence
  Description of Artificial Sequence: Synthetic epitope
RAAESTEIPP

SEQ ID NO: 40061 - protein, 10 aa, Artificial Sequence
  Description of Artificial Sequence: Synthetic epitope
RAAETVVDPE

SEQ ID NO: 40062 - protein, 10 aa, Artificial Sequence
  Description of Artificial Sequence: Synthetic epitope
RAAFTAGRMK

SEQ ID NO: 40063 - protein, 10 aa, Artificial Sequence
  Description of Artificial Sequence: Synthetic epitope
RAAKEAKEAP

SEQ ID NO: 40064 - protein, 10 aa, Artificial Sequence
  Description of Artificial Sequence: Synthetic epitope
RAAKGARSVE

SEQ ID NO: 40065 - protein, 10 aa, Artificial Sequence
  Description of Artificial Sequence: Synthetic epitope
RAAKVAEQQE

SEQ ID NO: 40066 - protein, 10 aa, Artificial Sequence
  Description of Artificial Sequence: Synthetic epitope
RAALAIQQLA

SEQ ID NO: 40067 - protein, 10 aa, Artificial Sequence
  Description of Artificial Sequence: Synthetic epitope
RAALEAKVKD

SEQ ID NO: 40068 - protein, 10 aa, Artificial Sequence
  Description of Artificial Sequence: Synthetic epitope
RAAMEMALRG

SEQ ID NO: 40069 - protein, 10 aa, Artificial Sequence
  Description of Artificial Sequence: Synthetic epitope
RAAMVKAHDS

SEQ ID NO: 40070 - protein, 10 aa, Artificial Sequence
  Description of Artificial Sequence: Synthetic epitope
RAANREEALE

SEQ ID NO: 40071 - protein, 10 aa, Artificial Sequence
  Description of Artificial Sequence: Synthetic epitope
RAANTHSSAK

SEQ ID NO: 40072 - protein, 10 aa, Artificial Sequence
  Description of Artificial Sequence: Synthetic epitope
RAAPHSYSAQ

SEQ ID NO: 40073 - protein, 10 aa, Artificial Sequence
  Description of Artificial Sequence: Synthetic epitope
RAAQEAASQE

SEQ ID NO: 40074 - protein, 10 aa, Artificial Sequence
  Description of Artificial Sequence: Synthetic epitope
RAARATSPRV

SEQ ID NO: 40075 - protein, 10 aa, Artificial Sequence
  Description of Artificial Sequence: Synthetic epitope
RAARELAANI

SEQ ID NO: 40076 - protein, 10 aa, Artificial Sequence
  Description of Artificial Sequence: Synthetic epitope
RAARETSYQW

SEQ ID NO: 40077 - protein, 10 aa, Artificial Sequence
  Description of Artificial Sequence: Synthetic epitope
RAARRQNDLE

SEQ ID NO: 40078 - protein, 10 aa, Artificial Sequence
  Description of Artificial Sequence: Synthetic epitope
RAARSTAQPQ

SEQ ID NO: 40079 - protein, 10 aa, Artificial Sequence
  Description of Artificial Sequence: Synthetic epitope
RAARTALRDQ

SEQ ID NO: 40080 - protein, 10 aa, Artificial Sequence
  Description of Artificial Sequence: Synthetic epitope
RAASDYAGKQ

SEQ ID NO: 40081 - protein, 10 aa, Artificial Sequence
  Description of Artificial Sequence: Synthetic epitope
RAASERLNRM

SEQ ID NO: 40082 - protein, 10 aa, Artificial Sequence
  Description of Artificial Sequence: Synthetic epitope
RAASESSLES

SEQ ID NO: 40083 - protein, 10 aa, Artificial Sequence
  Description of Artificial Sequence: Synthetic epitope
RAASLEAVSY

SEQ ID NO: 40084 - protein, 10 aa, Artificial Sequence
  Description of Artificial Sequence: Synthetic epitope
RAASSQRAEE

SEQ ID NO: 40085 - protein, 10 aa, Artificial Sequence
  Description of Artificial Sequence: Synthetic epitope
RAASSTSQSG

SEQ ID NO: 40086 - protein, 10 aa, Artificial Sequence
  Description of Artificial Sequence: Synthetic epitope
RAASTGKSKS

SEQ ID NO: 40087 - protein, 10 aa, Artificial Sequence
  Description of Artificial Sequence: Synthetic epitope
RAATAAVPKM

SEQ ID NO: 40088 - protein, 10 aa, Artificial Sequence
  Description of Artificial Sequence: Synthetic epitope
RAATMSAVEA

SEQ ID NO: 40089 - protein, 10 aa, Artificial Sequence
  Description of Artificial Sequence: Synthetic epitope
RAATTQLVSN

SEQ ID NO: 40090 - protein, 10 aa, Artificial Sequence
  Description of Artificial Sequence: Synthetic epitope
RAAVAFKAEG

SEQ ID NO: 40091 - protein, 10 aa, Artificial Sequence
  Description of Artificial Sequence: Synthetic epitope
RAAYIYIRGE

SEQ ID NO: 40092 - protein, 10 aa, Artificial Sequence
  Description of Artificial Sequence: Synthetic epitope
RADAAPSARS

SEQ ID NO: 40093 - protein, 10 aa, Artificial Sequence
  Description of Artificial Sequence: Synthetic epitope
RADHSAAVEN

SEQ ID NO: 40094 - protein, 10 aa, Artificial Sequence
  Description of Artificial Sequence: Synthetic epitope
RADRIALLEG

SEQ ID NO: 40095 - protein, 10 aa, Artificial Sequence
  Description of Artificial Sequence: Synthetic epitope
RADRISKMQT

SEQ ID NO: 40096 - protein, 10 aa, Artificial Sequence
  Description of Artificial Sequence: Synthetic epitope
RADRLTASST

SEQ ID NO: 40097 - protein, 10 aa, Artificial Sequence
  Description of Artificial Sequence: Synthetic epitope
RADSALSSAA

SEQ ID NO: 40098 - protein, 10 aa, Artificial Sequence
  Description of Artificial Sequence: Synthetic epitope
RADVDVQPYA

SEQ ID NO: 40099 - protein, 10 aa, Artificial Sequence
  Description of Artificial Sequence: Synthetic epitope
RADVTLEEKG

SEQ ID NO: 40100 - protein, 10 aa, Artificial Sequence
  Description of Artificial Sequence: Synthetic epitope
RAEAIKALVK

SEQ ID NO: 40101 - protein, 10 aa, Artificial Sequence
  Description of Artificial Sequence: Synthetic epitope
RAEASQLGHK

SEQ ID NO: 40102 - protein, 10 aa, Artificial Sequence
  Description of Artificial Sequence: Synthetic epitope
RAEEAAFSSG

SEQ ID NO: 40103 - protein, 10 aa, Artificial Sequence
  Description of Artificial Sequence: Synthetic epitope
RAEGSNQDDQ

SEQ ID NO: 40104 - protein, 10 aa, Artificial Sequence
  Description of Artificial Sequence: Synthetic epitope
RAEIQTEKNK

SEQ ID NO: 40105 - protein, 10 aa, Artificial Sequence
  Description of Artificial Sequence: Synthetic epitope
RAEKKDKDKQ

SEQ ID NO: 40106 - protein, 10 aa, Artificial Sequence
  Description of Artificial Sequence: Synthetic epitope
RAEKKVTLSS

SEQ ID NO: 40107 - protein, 10 aa, Artificial Sequence
  Description of Artificial Sequence: Synthetic epitope
RAEKKVTLSS

SEQ ID NO: 40108 - protein, 10 aa, Artificial Sequence
  Description of Artificial Sequence: Synthetic epitope
RAEKVTFQFS

SEQ ID NO: 40109 - protein, 10 aa, Artificial Sequence
  Description of Artificial Sequence: Synthetic epitope
RAELAKIMRT

SEQ ID NO: 40110 - protein, 10 aa, Artificial Sequence
  Description of Artificial Sequence: Synthetic epitope
RAELEALGMK

SEQ ID NO: 40111 - protein, 10 aa, Artificial Sequence
  Description of Artificial Sequence: Synthetic epitope
RAENQKTKEK

SEQ ID NO: 40112 - protein, 10 aa, Artificial Sequence
  Description of Artificial Sequence: Synthetic epitope
RAEPQSLDGV

SEQ ID NO: 40113 - protein, 10 aa, Artificial Sequence
  Description of Artificial Sequence: Synthetic epitope
RAEQSKAEEA

SEQ ID NO: 40114 - protein, 10 aa, Artificial Sequence
  Description of Artificial Sequence: Synthetic epitope
RAERKVAKGP

SEQ ID NO: 40115 - protein, 10 aa, Artificial Sequence
  Description of Artificial Sequence: Synthetic epitope
RAERNSAREE

SEQ ID NO: 40116 - protein, 10 aa, Artificial Sequence
  Description of Artificial Sequence: Synthetic epitope
RAESRGEKAI

SEQ ID NO: 40117 - protein, 10 aa, Artificial Sequence
  Description of Artificial Sequence: Synthetic epitope
RAESSDRERE

SEQ ID NO: 40118 - protein, 10 aa, Artificial Sequence
  Description of Artificial Sequence: Synthetic epitope
RAESVATKAE

SEQ ID NO: 40119 - protein, 10 aa, Artificial Sequence
  Description of Artificial Sequence: Synthetic epitope
RAETQNTHSN

SEQ ID NO: 40120 - protein, 10 aa, Artificial Sequence
  Description of Artificial Sequence: Synthetic epitope
RAEVGEKTEE

SEQ ID NO: 40121 - protein, 10 aa, Artificial Sequence
  Description of Artificial Sequence: Synthetic epitope
RAEVKRLSHE

SEQ ID NO: 40122 - protein, 10 aa, Artificial Sequence
  Description of Artificial Sequence: Synthetic epitope
RAEVSELKIE

SEQ ID NO: 40123 - protein, 10 aa, Artificial Sequence
  Description of Artificial Sequence: Synthetic epitope
RAEVSNQTVG

SEQ ID NO: 40124 - protein, 10 aa, Artificial Sequence
  Description of Artificial Sequence: Synthetic epitope
RAFAMPAPTP

SEQ ID NO: 40125 - protein, 10 aa, Artificial Sequence
  Description of Artificial Sequence: Synthetic epitope
RAFEQQYSPI

SEQ ID NO: 40126 - protein, 10 aa, Artificial Sequence
  Description of Artificial Sequence: Synthetic epitope
RAFKALAPLL

SEQ ID NO: 40127 - protein, 10 aa, Artificial Sequence
  Description of Artificial Sequence: Synthetic epitope
RAFKENLETS

SEQ ID NO: 40128 - protein, 10 aa, Artificial Sequence
  Description of Artificial Sequence: Synthetic epitope
RAFPKKLVAF

SEQ ID NO: 40129 - protein, 10 aa, Artificial Sequence
  Description of Artificial Sequence: Synthetic epitope
RAFQKLTDFP

SEQ ID NO: 40130 - protein, 10 aa, Artificial Sequence
  Description of Artificial Sequence: Synthetic epitope
RAFQVKQMKL

SEQ ID NO: 40131 - protein, 10 aa, Artificial Sequence
  Description of Artificial Sequence: Synthetic epitope
RAFSAEVQER

SEQ ID NO: 40132 - protein, 10 aa, Artificial Sequence
  Description of Artificial Sequence: Synthetic epitope
RAFTEMTPSF

SEQ ID NO: 40133 - protein, 10 aa, Artificial Sequence
  Description of Artificial Sequence: Synthetic epitope
RAGALKAEAG

SEQ ID NO: 40134 - protein, 10 aa, Artificial Sequence
  Description of Artificial Sequence: Synthetic epitope
RAGARVRNIE

SEQ ID NO: 40135 - protein, 10 aa, Artificial Sequence
  Description of Artificial Sequence: Synthetic epitope
RAGATLSAEG

SEQ ID NO: 40136 - protein, 10 aa, Artificial Sequence
  Description of Artificial Sequence: Synthetic epitope
RAGDAVAFPH

SEQ ID NO: 40137 - protein, 10 aa, Artificial Sequence
  Description of Artificial Sequence: Synthetic epitope
RAGDKDDITE

SEQ ID NO: 40138 - protein, 10 aa, Artificial Sequence
  Description of Artificial Sequence: Synthetic epitope
RAGEAEESSA

SEQ ID NO: 40139 - protein, 10 aa, Artificial Sequence
  Description of Artificial Sequence: Synthetic epitope
RAGKLIENVD

SEQ ID NO: 40140 - protein, 10 aa, Artificial Sequence
  Description of Artificial Sequence: Synthetic epitope
RAGQAATKLL

SEQ ID NO: 40141 - protein, 10 aa, Artificial Sequence
  Description of Artificial Sequence: Synthetic epitope
RAGRTQEAWK

SEQ ID NO: 40142 - protein, 10 aa, Artificial Sequence
  Description of Artificial Sequence: Synthetic epitope
RAGSRKLESR

SEQ ID NO: 40143 - protein, 10 aa, Artificial Sequence
  Description of Artificial Sequence: Synthetic epitope
RAGVLSSLSP

SEQ ID NO: 40144 - protein, 10 aa, Artificial Sequence
  Description of Artificial Sequence: Synthetic epitope
RAGVQIAIMT

SEQ ID NO: 40145 - protein, 10 aa, Artificial Sequence
  Description of Artificial Sequence: Synthetic epitope
RAGVVIDSSL

SEQ ID NO: 40146 - protein, 10 aa, Artificial Sequence
  Description of Artificial Sequence: Synthetic epitope
RAGYQSTLTR

SEQ ID NO: 40147 - protein, 10 aa, Artificial Sequence
  Description of Artificial Sequence: Synthetic epitope
RAHATAKATV

SEQ ID NO: 40148 - protein, 10 aa, Artificial Sequence
  Description of Artificial Sequence: Synthetic epitope
RAHKARALAR

SEQ ID NO: 40149 - protein, 10 aa, Artificial Sequence
  Description of Artificial Sequence: Synthetic epitope
RAHKTVPQQV

SEQ ID NO: 40150 - protein, 10 aa, Artificial Sequence
  Description of Artificial Sequence: Synthetic epitope
RAHRVTSEKL

SEQ ID NO: 40151 - protein, 10 aa, Artificial Sequence
  Description of Artificial Sequence: Synthetic epitope
RAHSSLSSTM

SEQ ID NO: 40152 - protein, 10 aa, Artificial Sequence
  Description of Artificial Sequence: Synthetic epitope
RAHYNSSNKS

SEQ ID NO: 40153 - protein, 10 aa, Artificial Sequence
  Description of Artificial Sequence: Synthetic epitope
RAIILETRQH

SEQ ID NO: 40154 - protein, 10 aa, Artificial Sequence
  Description of Artificial Sequence: Synthetic epitope
RAIKATPMAV

SEQ ID NO: 40155 - protein, 10 aa, Artificial Sequence
  Description of Artificial Sequence: Synthetic epitope
RAIKEHKMDQ

SEQ ID NO: 40156 - protein, 10 aa, Artificial Sequence
  Description of Artificial Sequence: Synthetic epitope
RAIQMASRTG

SEQ ID NO: 40157 - protein, 10 aa, Artificial Sequence
  Description of Artificial Sequence: Synthetic epitope
RAIQSLTIQT

SEQ ID NO: 40158 - protein, 10 aa, Artificial Sequence
  Description of Artificial Sequence: Synthetic epitope
RAIQTALRNA

SEQ ID NO: 40159 - protein, 10 aa, Artificial Sequence
  Description of Artificial Sequence: Synthetic epitope
RAITTSSHLK

SEQ ID NO: 40160 - protein, 10 aa, Artificial Sequence
  Description of Artificial Sequence: Synthetic epitope
RAIVNSLAQA

SEQ ID NO: 40161 - protein, 10 aa, Artificial Sequence
  Description of Artificial Sequence: Synthetic epitope
RAKALELERK

SEQ ID NO: 40162 - protein, 10 aa, Artificial Sequence
  Description of Artificial Sequence: Synthetic epitope
RAKFYSVAQE

SEQ ID NO: 40163 - protein, 10 aa, Artificial Sequence
  Description of Artificial Sequence: Synthetic epitope
RAKGKEAMHT

SEQ ID NO: 40164 - protein, 10 aa, Artificial Sequence
  Description of Artificial Sequence: Synthetic epitope
RAKKMNLIQS

SEQ ID NO: 40165 - protein, 10 aa, Artificial Sequence
  Description of Artificial Sequence: Synthetic epitope
RAKKRRTSSQ

SEQ ID NO: 40166 - protein, 10 aa, Artificial Sequence
  Description of Artificial Sequence: Synthetic epitope
RAKKRSDELG

SEQ ID NO: 40167 - protein, 10 aa, Artificial Sequence
  Description of Artificial Sequence: Synthetic epitope
RAKKVKMGQL

SEQ ID NO: 40168 - protein, 10 aa, Artificial Sequence
  Description of Artificial Sequence: Synthetic epitope
RAKLHDGTSV

SEQ ID NO: 40169 - protein, 10 aa, Artificial Sequence
  Description of Artificial Sequence: Synthetic epitope
RAKLMQQKQQ

SEQ ID NO: 40170 - protein, 10 aa, Artificial Sequence
  Description of Artificial Sequence: Synthetic epitope
RAKLSKALAL

SEQ ID NO: 40171 - protein, 10 aa, Artificial Sequence
  Description of Artificial Sequence: Synthetic epitope
RAKLSMINTM

SEQ ID NO: 40172 - protein, 10 aa, Artificial Sequence
  Description of Artificial Sequence: Synthetic epitope
RAKPSPSYIN

SEQ ID NO: 40173 - protein, 10 aa, Artificial Sequence
  Description of Artificial Sequence: Synthetic epitope
RAKQEELEAA

SEQ ID NO: 40174 - protein, 10 aa, Artificial Sequence
  Description of Artificial Sequence: Synthetic epitope
RAKRYSSQRQ

SEQ ID NO: 40175 - protein, 10 aa, Artificial Sequence
  Description of Artificial Sequence: Synthetic epitope
RAKSKEKKSE

SEQ ID NO: 40176 - protein, 10 aa, Artificial Sequence
  Description of Artificial Sequence: Synthetic epitope
RAKVAMSHFE

SEQ ID NO: 40177 - protein, 10 aa, Artificial Sequence
  Description of Artificial Sequence: Synthetic epitope
RAKVHELIER

SEQ ID NO: 40178 - protein, 10 aa, Artificial Sequence
  Description of Artificial Sequence: Synthetic epitope
RAKVQPQARK

SEQ ID NO: 40179 - protein, 10 aa, Artificial Sequence
  Description of Artificial Sequence: Synthetic epitope
RALAALVPGV

SEQ ID NO: 40180 - protein, 10 aa, Artificial Sequence
  Description of Artificial Sequence: Synthetic epitope
RALAKTGAES

SEQ ID NO: 40181 - protein, 10 aa, Artificial Sequence
  Description of Artificial Sequence: Synthetic epitope
RALAPAVTSQ

SEQ ID NO: 40182 - protein, 10 aa, Artificial Sequence
  Description of Artificial Sequence: Synthetic epitope
RALAPAVTSQ

SEQ ID NO: 40183 - protein, 10 aa, Artificial Sequence
  Description of Artificial Sequence: Synthetic epitope
RALARGLVRA

SEQ ID NO: 40184 - protein, 10 aa, Artificial Sequence
  Description of Artificial Sequence: Synthetic epitope
RALDTAAGSP

SEQ ID NO: 40185 - protein, 10 aa, Artificial Sequence
  Description of Artificial Sequence: Synthetic epitope
RALEERSDWE

SEQ ID NO: 40186 - protein, 10 aa, Artificial Sequence
  Description of Artificial Sequence: Synthetic epitope
RALESAMAKK

SEQ ID NO: 40187 - protein, 10 aa, Artificial Sequence
  Description of Artificial Sequence: Synthetic epitope
RALESAVQHE

SEQ ID NO: 40188 - protein, 10 aa, Artificial Sequence
  Description of Artificial Sequence: Synthetic epitope
RALFAVAREL

SEQ ID NO: 40189 - protein, 10 aa, Artificial Sequence
  Description of Artificial Sequence: Synthetic epitope
RALFSQISSA

SEQ ID NO: 40190 - protein, 10 aa, Artificial Sequence
  Description of Artificial Sequence: Synthetic epitope
RALGISISLE

SEQ ID NO: 40191 - protein, 10 aa, Artificial Sequence
  Description of Artificial Sequence: Synthetic epitope
RALGRASRAE

SEQ ID NO: 40192 - protein, 10 aa, Artificial Sequence
  Description of Artificial Sequence: Synthetic epitope
RALGSTAAQS

SEQ ID NO: 40193 - protein, 10 aa, Artificial Sequence
  Description of Artificial Sequence: Synthetic epitope
RALGVQSLEE

SEQ ID NO: 40194 - protein, 10 aa, Artificial Sequence
  Description of Artificial Sequence: Synthetic epitope
RALKESGAGM

SEQ ID NO: 40195 - protein, 10 aa, Artificial Sequence
  Description of Artificial Sequence: Synthetic epitope
RALKEVSKLV

SEQ ID NO: 40196 - protein, 10 aa, Artificial Sequence
  Description of Artificial Sequence: Synthetic epitope
RALKFQQYVQ

SEQ ID NO: 40197 - protein, 10 aa, Artificial Sequence
  Description of Artificial Sequence: Synthetic epitope
RALKYEVQGE

SEQ ID NO: 40198 - protein, 10 aa, Artificial Sequence
  Description of Artificial Sequence: Synthetic epitope
RALLAARASL

SEQ ID NO: 40199 - protein, 10 aa, Artificial Sequence
  Description of Artificial Sequence: Synthetic epitope
RALLEQKQKK

SEQ ID NO: 40200 - protein, 10 aa, Artificial Sequence
  Description of Artificial Sequence: Synthetic epitope
RALLQAILQT

SEQ ID NO: 40201 - protein, 10 aa, Artificial Sequence
  Description of Artificial Sequence: Synthetic epitope
RALLRAESLA

SEQ ID NO: 40202 - protein, 10 aa, Artificial Sequence
  Description of Artificial Sequence: Synthetic epitope
RALLSKAYDL

SEQ ID NO: 40203 - protein, 10 aa, Artificial Sequence
  Description of Artificial Sequence: Synthetic epitope
RALMAAKRSS

SEQ ID NO: 40204 - protein, 10 aa, Artificial Sequence
  Description of Artificial Sequence: Synthetic epitope
RALMARNMLP

SEQ ID NO: 40205 - protein, 10 aa, Artificial Sequence
  Description of Artificial Sequence: Synthetic epitope
RALMARNMLP

SEQ ID NO: 40206 - protein, 10 aa, Artificial Sequence
  Description of Artificial Sequence: Synthetic epitope
RALNEITESG

SEQ ID NO: 40207 - protein, 10 aa, Artificial Sequence
  Description of Artificial Sequence: Synthetic epitope
RALQTSKVSS

SEQ ID NO: 40208 - protein, 10 aa, Artificial Sequence
  Description of Artificial Sequence: Synthetic epitope
RALRALLVAP

SEQ ID NO: 40209 - protein, 10 aa, Artificial Sequence
  Description of Artificial Sequence: Synthetic epitope
RALRQLESLA

SEQ ID NO: 40210 - protein, 10 aa, Artificial Sequence
  Description of Artificial Sequence: Synthetic epitope
RALRRSEALE

SEQ ID NO: 40211 - protein, 10 aa, Artificial Sequence
  Description of Artificial Sequence: Synthetic epitope
RALRSETELL

SEQ ID NO: 40212 - protein, 10 aa, Artificial Sequence
  Description of Artificial Sequence: Synthetic epitope
RALRSSGTAA

SEQ ID NO: 40213 - protein, 10 aa, Artificial Sequence
  Description of Artificial Sequence: Synthetic epitope
RALSQAAVEE

SEQ ID NO: 40214 - protein, 10 aa, Artificial Sequence
  Description of Artificial Sequence: Synthetic epitope
RALSQESSKY

SEQ ID NO: 40215 - protein, 10 aa, Artificial Sequence
  Description of Artificial Sequence: Synthetic epitope
RALSQNRELK

SEQ ID NO: 40216 - protein, 10 aa, Artificial Sequence
  Description of Artificial Sequence: Synthetic epitope
RALTSENNKL

SEQ ID NO: 40217 - protein, 10 aa, Artificial Sequence
  Description of Artificial Sequence: Synthetic epitope
RALTSKRLQV

SEQ ID NO: 40218 - protein, 10 aa, Artificial Sequence
  Description of Artificial Sequence: Synthetic epitope
RALVAKEALV

SEQ ID NO: 40219 - protein, 10 aa, Artificial Sequence
  Description of Artificial Sequence: Synthetic epitope
RALVINMRVR

SEQ ID NO: 40220 - protein, 10 aa, Artificial Sequence
  Description of Artificial Sequence: Synthetic epitope
RAMQKVMATT

SEQ ID NO: 40221 - protein, 10 aa, Artificial Sequence
  Description of Artificial Sequence: Synthetic epitope
RAMRFISRNV

SEQ ID NO: 40222 - protein, 10 aa, Artificial Sequence
  Description of Artificial Sequence: Synthetic epitope
RAMSARLLDY

SEQ ID NO: 40223 - protein, 10 aa, Artificial Sequence
  Description of Artificial Sequence: Synthetic epitope
RAMSKASKVP

SEQ ID NO: 40224 - protein, 10 aa, Artificial Sequence
  Description of Artificial Sequence: Synthetic epitope
RAMSTNTMVL

SEQ ID NO: 40225 - protein, 10 aa, Artificial Sequence
  Description of Artificial Sequence: Synthetic epitope
RANAKGVREE

SEQ ID NO: 40226 - protein, 10 aa, Artificial Sequence
  Description of Artificial Sequence: Synthetic epitope
RANDINYQDQ

SEQ ID NO: 40227 - protein, 10 aa, Artificial Sequence
  Description of Artificial Sequence: Synthetic epitope
RANLRTKGKQ

SEQ ID NO: 40228 - protein, 10 aa, Artificial Sequence
  Description of Artificial Sequence: Synthetic epitope
RANNTMGINS

SEQ ID NO: 40229 - protein, 10 aa, Artificial Sequence
  Description of Artificial Sequence: Synthetic epitope
RANQDTNTAQ

SEQ ID NO: 40230 - protein, 10 aa, Artificial Sequence
  Description of Artificial Sequence: Synthetic epitope
RANYKNNSKS

SEQ ID NO: 40231 - protein, 10 aa, Artificial Sequence
  Description of Artificial Sequence: Synthetic epitope
RAPAARNWHI

SEQ ID NO: 40232 - protein, 10 aa, Artificial Sequence
  Description of Artificial Sequence: Synthetic epitope
RAPATSVSAD

SEQ ID NO: 40233 - protein, 10 aa, Artificial Sequence
  Description of Artificial Sequence: Synthetic epitope
RAPEQSSTAA

SEQ ID NO: 40234 - protein, 10 aa, Artificial Sequence
  Description of Artificial Sequence: Synthetic epitope
RAPFQYTEGY

SEQ ID NO: 40235 - protein, 10 aa, Artificial Sequence
  Description of Artificial Sequence: Synthetic epitope
RAPKADISKS

SEQ ID NO: 40236 - protein, 10 aa, Artificial Sequence
  Description of Artificial Sequence: Synthetic epitope
RAPMVSVSSE

SEQ ID NO: 40237 - protein, 10 aa, Artificial Sequence
  Description of Artificial Sequence: Synthetic epitope
RAPNSNNSKP

SEQ ID NO: 40238 - protein, 10 aa, Artificial Sequence
  Description of Artificial Sequence: Synthetic epitope
RAPRTSKAQR

SEQ ID NO: 40239 - protein, 10 aa, Artificial Sequence
  Description of Artificial Sequence: Synthetic epitope
RAPSASVDSS

SEQ ID NO: 40240 - protein, 10 aa, Artificial Sequence
  Description of Artificial Sequence: Synthetic epitope
RAPSQRLSSF

SEQ ID NO: 40241 - protein, 10 aa, Artificial Sequence
  Description of Artificial Sequence: Synthetic epitope
RAPSRIFWRT

SEQ ID NO: 40242 - protein, 10 aa, Artificial Sequence
  Description of Artificial Sequence: Synthetic epitope
RAPTASADAE

SEQ ID NO: 40243 - protein, 10 aa, Artificial Sequence
  Description of Artificial Sequence: Synthetic epitope
RAPVAQTSRM

SEQ ID NO: 40244 - protein, 10 aa, Artificial Sequence
  Description of Artificial Sequence: Synthetic epitope
RAQAKVARTQ

SEQ ID NO: 40245 - protein, 10 aa, Artificial Sequence
  Description of Artificial Sequence: Synthetic epitope
RAQARNLDQS

SEQ ID NO: 40246 - protein, 10 aa, Artificial Sequence
  Description of Artificial Sequence: Synthetic epitope
RAQDSAQLSE

SEQ ID NO: 40247 - protein, 10 aa, Artificial Sequence
  Description of Artificial Sequence: Synthetic epitope
RAQELAQPGD

SEQ ID NO: 40248 - protein, 10 aa, Artificial Sequence
  Description of Artificial Sequence: Synthetic epitope
RAQEQRSLEA

SEQ ID NO: 40249 - protein, 10 aa, Artificial Sequence
  Description of Artificial Sequence: Synthetic epitope
RAQGGNLNYS

SEQ ID NO: 40250 - protein, 10 aa, Artificial Sequence
  Description of Artificial Sequence: Synthetic epitope
RAQGGSSDSS

SEQ ID NO: 40251 - protein, 10 aa, Artificial Sequence
  Description of Artificial Sequence: Synthetic epitope
RAQGISANKF

SEQ ID NO: 40252 - protein, 10 aa, Artificial Sequence
  Description of Artificial Sequence: Synthetic epitope
RAQKASTAER

SEQ ID NO: 40253 - protein, 10 aa, Artificial Sequence
  Description of Artificial Sequence: Synthetic epitope
RAQKMDGESE

SEQ ID NO: 40254 - protein, 10 aa, Artificial Sequence
  Description of Artificial Sequence: Synthetic epitope
RAQKMKSKKL

SEQ ID NO: 40255 - protein, 10 aa, Artificial Sequence
  Description of Artificial Sequence: Synthetic epitope
RAQKRSVGSD

SEQ ID NO: 40256 - protein, 10 aa, Artificial Sequence
  Description of Artificial Sequence: Synthetic epitope
RAQKVMIRSS

SEQ ID NO: 40257 - protein, 10 aa, Artificial Sequence
  Description of Artificial Sequence: Synthetic epitope
RAQLGVQEVQ

SEQ ID NO: 40258 - protein, 10 aa, Artificial Sequence
  Description of Artificial Sequence: Synthetic epitope
RAQLSFNTDT

SEQ ID NO: 40259 - protein, 10 aa, Artificial Sequence
  Description of Artificial Sequence: Synthetic epitope
RAQMAKRQKA

SEQ ID NO: 40260 - protein, 10 aa, Artificial Sequence
  Description of Artificial Sequence: Synthetic epitope
RAQQARAQRE

SEQ ID NO: 40261 - protein, 10 aa, Artificial Sequence
  Description of Artificial Sequence: Synthetic epitope
RAQQILEAKK

SEQ ID NO: 40262 - protein, 10 aa, Artificial Sequence
  Description of Artificial Sequence: Synthetic epitope
RAQQKTLTSA

SEQ ID NO: 40263 - protein, 10 aa, Artificial Sequence
  Description of Artificial Sequence: Synthetic epitope
RAQQSLLGHW

SEQ ID NO: 40264 - protein, 10 aa, Artificial Sequence
  Description of Artificial Sequence: Synthetic epitope
RAQQYLAAWD

SEQ ID NO: 40265 - protein, 10 aa, Artificial Sequence
  Description of Artificial Sequence: Synthetic epitope
RAQRAINNEM

SEQ ID NO: 40266 - protein, 10 aa, Artificial Sequence
  Description of Artificial Sequence: Synthetic epitope
RAQVQVESQL

SEQ ID NO: 40267 - protein, 10 aa, Artificial Sequence
  Description of Artificial Sequence: Synthetic epitope
RAQVSALESK

SEQ ID NO: 40268 - protein, 10 aa, Artificial Sequence
  Description of Artificial Sequence: Synthetic epitope
RARASKDRRE

SEQ ID NO: 40269 - protein, 10 aa, Artificial Sequence
  Description of Artificial Sequence: Synthetic epitope
RARASNEDGD

SEQ ID NO: 40270 - protein, 10 aa, Artificial Sequence
  Description of Artificial Sequence: Synthetic epitope
RARDTASGSE

SEQ ID NO: 40271 - protein, 10 aa, Artificial Sequence
  Description of Artificial Sequence: Synthetic epitope
RARFNASKTD

SEQ ID NO: 40272 - protein, 10 aa, Artificial Sequence
  Description of Artificial Sequence: Synthetic epitope
RARGSAIDED

SEQ ID NO: 40273 - protein, 10 aa, Artificial Sequence
  Description of Artificial Sequence: Synthetic epitope
RARLANTQGK

SEQ ID NO: 40274 - protein, 10 aa, Artificial Sequence
  Description of Artificial Sequence: Synthetic epitope
RARLKNQVTQ

SEQ ID NO: 40275 - protein, 10 aa, Artificial Sequence
  Description of Artificial Sequence: Synthetic epitope
RARLSSATAN

SEQ ID NO: 40276 - protein, 10 aa, Artificial Sequence
  Description of Artificial Sequence: Synthetic epitope
RARMASLRQG

SEQ ID NO: 40277 - protein, 10 aa, Artificial Sequence
  Description of Artificial Sequence: Synthetic epitope
RARRALLEQT

SEQ ID NO: 40278 - protein, 10 aa, Artificial Sequence
  Description of Artificial Sequence: Synthetic epitope
RARRSASPHD

SEQ ID NO: 40279 - protein, 10 aa, Artificial Sequence
  Description of Artificial Sequence: Synthetic epitope
RARSVKLPLE

SEQ ID NO: 40280 - protein, 10 aa, Artificial Sequence
  Description of Artificial Sequence: Synthetic epitope
RARTQSVHES

SEQ ID NO: 40281 - protein, 10 aa, Artificial Sequence
  Description of Artificial Sequence: Synthetic epitope
RARVERNAVE

SEQ ID NO: 40282 - protein, 10 aa, Artificial Sequence
  Description of Artificial Sequence: Synthetic epitope
RASAAQDADS

SEQ ID NO: 40283 - protein, 10 aa, Artificial Sequence
  Description of Artificial Sequence: Synthetic epitope
RASAQRMGDT

SEQ ID NO: 40284 - protein, 10 aa, Artificial Sequence
  Description of Artificial Sequence: Synthetic epitope
RASARAGIHL

SEQ ID NO: 40285 - protein, 10 aa, Artificial Sequence
  Description of Artificial Sequence: Synthetic epitope
RASASLTNQV

SEQ ID NO: 40286 - protein, 10 aa, Artificial Sequence
  Description of Artificial Sequence: Synthetic epitope
RASASSFLNM

SEQ ID NO: 40287 - protein, 10 aa, Artificial Sequence
  Description of Artificial Sequence: Synthetic epitope
RASDESVLSM

SEQ ID NO: 40288 - protein, 10 aa, Artificial Sequence
  Description of Artificial Sequence: Synthetic epitope
RASEESHVLK

SEQ ID NO: 40289 - protein, 10 aa, Artificial Sequence
  Description of Artificial Sequence: Synthetic epitope
RASELRSFSR

SEQ ID NO: 40290 - protein, 10 aa, Artificial Sequence
  Description of Artificial Sequence: Synthetic epitope
RASELVSDKR

SEQ ID NO: 40291 - protein, 10 aa, Artificial Sequence
  Description of Artificial Sequence: Synthetic epitope
RASERLAEID

SEQ ID NO: 40292 - protein, 10 aa, Artificial Sequence
  Description of Artificial Sequence: Synthetic epitope
RASESTARSS

SEQ ID NO: 40293 - protein, 10 aa, Artificial Sequence
  Description of Artificial Sequence: Synthetic epitope
RASGFSSEAD

SEQ ID NO: 40294 - protein, 10 aa, Artificial Sequence
  Description of Artificial Sequence: Synthetic epitope
RASGVEARQA

SEQ ID NO: 40295 - protein, 10 aa, Artificial Sequence
  Description of Artificial Sequence: Synthetic epitope
RASKIREKVD

SEQ ID NO: 40296 - protein, 10 aa, Artificial Sequence
  Description of Artificial Sequence: Synthetic epitope
RASKTSLEHL

SEQ ID NO: 40297 - protein, 10 aa, Artificial Sequence
  Description of Artificial Sequence: Synthetic epitope
RASLAQFEQK

SEQ ID NO: 40298 - protein, 10 aa, Artificial Sequence
  Description of Artificial Sequence: Synthetic epitope
RASLKKSTMG

SEQ ID NO: 40299 - protein, 10 aa, Artificial Sequence
  Description of Artificial Sequence: Synthetic epitope
RASLLKSQEP

SEQ ID NO: 40300 - protein, 10 aa, Artificial Sequence
  Description of Artificial Sequence: Synthetic epitope
RASLLQNEST

SEQ ID NO: 40301 - protein, 10 aa, Artificial Sequence
  Description of Artificial Sequence: Synthetic epitope
RASLQQTQAV

SEQ ID NO: 40302 - protein, 10 aa, Artificial Sequence
  Description of Artificial Sequence: Synthetic epitope
RASLWAQEAK

SEQ ID NO: 40303 - protein, 10 aa, Artificial Sequence
  Description of Artificial Sequence: Synthetic epitope
RASPSATLAA

SEQ ID NO: 40304 - protein, 10 aa, Artificial Sequence
  Description of Artificial Sequence: Synthetic epitope
RASQEANLLT

SEQ ID NO: 40305 - protein, 10 aa, Artificial Sequence
  Description of Artificial Sequence: Synthetic epitope
RASQILSTDA

SEQ ID NO: 40306 - protein, 10 aa, Artificial Sequence
  Description of Artificial Sequence: Synthetic epitope
RASQLTVSSL

SEQ ID NO: 40307 - protein, 10 aa, Artificial Sequence
  Description of Artificial Sequence: Synthetic epitope
RASQRALTQV

SEQ ID NO: 40308 - protein, 10 aa, Artificial Sequence
  Description of Artificial Sequence: Synthetic epitope
RASQTQNRGQ

SEQ ID NO: 40309 - protein, 10 aa, Artificial Sequence
  Description of Artificial Sequence: Synthetic epitope
RASRNVMPLG

SEQ ID NO: 40310 - protein, 10 aa, Artificial Sequence
  Description of Artificial Sequence: Synthetic epitope
RASSGASAVE

SEQ ID NO: 40311 - protein, 10 aa, Artificial Sequence
  Description of Artificial Sequence: Synthetic epitope
RASSLAESFE

SEQ ID NO: 40312 - protein, 10 aa, Artificial Sequence
  Description of Artificial Sequence: Synthetic epitope
RASSLQTSPG

SEQ ID NO: 40313 - protein, 10 aa, Artificial Sequence
  Description of Artificial Sequence: Synthetic epitope
RASSTHAKGE

SEQ ID NO: 40314 - protein, 10 aa, Artificial Sequence
  Description of Artificial Sequence: Synthetic epitope
RASSVSSVPV

SEQ ID NO: 40315 - protein, 10 aa, Artificial Sequence
  Description of Artificial Sequence: Synthetic epitope
RASSVTRAGK

SEQ ID NO: 40316 - protein, 10 aa, Artificial Sequence
  Description of Artificial Sequence: Synthetic epitope
RASTETSNAK

SEQ ID NO: 40317 - protein, 10 aa, Artificial Sequence
  Description of Artificial Sequence: Synthetic epitope
RASTIEMPQQ

SEQ ID NO: 40318 - protein, 10 aa, Artificial Sequence
  Description of Artificial Sequence: Synthetic epitope
RASTLKDDQK

SEQ ID NO: 40319 - protein, 10 aa, Artificial Sequence
  Description of Artificial Sequence: Synthetic epitope
RASTPEIMAT

SEQ ID NO: 40320 - protein, 10 aa, Artificial Sequence
  Description of Artificial Sequence: Synthetic epitope
RASVVQPQTL

SEQ ID NO: 40321 - protein, 10 aa, Artificial Sequence
  Description of Artificial Sequence: Synthetic epitope
RASYAAGPAS

SEQ ID NO: 40322 - protein, 10 aa, Artificial Sequence
  Description of Artificial Sequence: Synthetic epitope
RATAPGAMKM

SEQ ID NO: 40323 - protein, 10 aa, Artificial Sequence
  Description of Artificial Sequence: Synthetic epitope
RATDAMKNFS

SEQ ID NO: 40324 - protein, 10 aa, Artificial Sequence
  Description of Artificial Sequence: Synthetic epitope
RATEKAFGQN

SEQ ID NO: 40325 - protein, 10 aa, Artificial Sequence
  Description of Artificial Sequence: Synthetic epitope
RATGEGGASD

SEQ ID NO: 40326 - protein, 10 aa, Artificial Sequence
  Description of Artificial Sequence: Synthetic epitope
RATGEQQRTA

SEQ ID NO: 40327 - protein, 10 aa, Artificial Sequence
  Description of Artificial Sequence: Synthetic epitope
RATGVAWESQ

SEQ ID NO: 40328 - protein, 10 aa, Artificial Sequence
  Description of Artificial Sequence: Synthetic epitope
RATKKEPAVL

SEQ ID NO: 40329 - protein, 10 aa, Artificial Sequence
  Description of Artificial Sequence: Synthetic epitope
RATKLKVSKF

SEQ ID NO: 40330 - protein, 10 aa, Artificial Sequence
  Description of Artificial Sequence: Synthetic epitope
RATLAALFNN

SEQ ID NO: 40331 - protein, 10 aa, Artificial Sequence
  Description of Artificial Sequence: Synthetic epitope
RATLLESIRQ

SEQ ID NO: 40332 - protein, 10 aa, Artificial Sequence
  Description of Artificial Sequence: Synthetic epitope
RATLLESIRQ

SEQ ID NO: 40333 - protein, 10 aa, Artificial Sequence
  Description of Artificial Sequence: Synthetic epitope
RATLRQMTRP

SEQ ID NO: 40334 - protein, 10 aa, Artificial Sequence
  Description of Artificial Sequence: Synthetic epitope
RATNRGEEAT

SEQ ID NO: 40335 - protein, 10 aa, Artificial Sequence
  Description of Artificial Sequence: Synthetic epitope
RATQSIERSH

SEQ ID NO: 40336 - protein, 10 aa, Artificial Sequence
  Description of Artificial Sequence: Synthetic epitope
RATRKPLVQT

SEQ ID NO: 40337 - protein, 10 aa, Artificial Sequence
  Description of Artificial Sequence: Synthetic epitope
RATSEEDMAQ

SEQ ID NO: 40338 - protein, 10 aa, Artificial Sequence
  Description of Artificial Sequence: Synthetic epitope
RATSFEESER

SEQ ID NO: 40339 - protein, 10 aa, Artificial Sequence
  Description of Artificial Sequence: Synthetic epitope
RATSNNRVRE

SEQ ID NO: 40340 - protein, 10 aa, Artificial Sequence
  Description of Artificial Sequence: Synthetic epitope
RATSSRARLY

SEQ ID NO: 40341 - protein, 10 aa, Artificial Sequence
  Description of Artificial Sequence: Synthetic epitope
RAVADASHVS

SEQ ID NO: 40342 - protein, 10 aa, Artificial Sequence
  Description of Artificial Sequence: Synthetic epitope
RAVAKAALSP

SEQ ID NO: 40343 - protein, 10 aa, Artificial Sequence
  Description of Artificial Sequence: Synthetic epitope
RAVALTSTKP

SEQ ID NO: 40344 - protein, 10 aa, Artificial Sequence
  Description of Artificial Sequence: Synthetic epitope
RAVASRSADR

SEQ ID NO: 40345 - protein, 10 aa, Artificial Sequence
  Description of Artificial Sequence: Synthetic epitope
RAVDALAALQ

SEQ ID NO: 40346 - protein, 10 aa, Artificial Sequence
  Description of Artificial Sequence: Synthetic epitope
RAVEQAAPWL

SEQ ID NO: 40347 - protein, 10 aa, Artificial Sequence
  Description of Artificial Sequence: Synthetic epitope
RAVERLSETE

SEQ ID NO: 40348 - protein, 10 aa, Artificial Sequence
  Description of Artificial Sequence: Synthetic epitope
RAVETTAQSD

SEQ ID NO: 40349 - protein, 10 aa, Artificial Sequence
  Description of Artificial Sequence: Synthetic epitope
RAVEVSAELG

SEQ ID NO: 40350 - protein, 10 aa, Artificial Sequence
  Description of Artificial Sequence: Synthetic epitope
RAVGNFKEQT

SEQ ID NO: 40351 - protein, 10 aa, Artificial Sequence
  Description of Artificial Sequence: Synthetic epitope
RAVIQSELLS

SEQ ID NO: 40352 - protein, 10 aa, Artificial Sequence
  Description of Artificial Sequence: Synthetic epitope
RAVITSLLDQ

SEQ ID NO: 40353 - protein, 10 aa, Artificial Sequence
  Description of Artificial Sequence: Synthetic epitope
RAVLRLTVTV

SEQ ID NO: 40354 - protein, 10 aa, Artificial Sequence
  Description of Artificial Sequence: Synthetic epitope
RAVMETIAVG

SEQ ID NO: 40355 - protein, 10 aa, Artificial Sequence
  Description of Artificial Sequence: Synthetic epitope
RAVPEEMELA

SEQ ID NO: 40356 - protein, 10 aa, Artificial Sequence
  Description of Artificial Sequence: Synthetic epitope
RAVPVLKMDA

SEQ ID NO: 40357 - protein, 10 aa, Artificial Sequence
  Description of Artificial Sequence: Synthetic epitope
RAVQSSTSIR

SEQ ID NO: 40358 - protein, 10 aa, Artificial Sequence
  Description of Artificial Sequence: Synthetic epitope
RAVRKDQTSK

SEQ ID NO: 40359 - protein, 10 aa, Artificial Sequence
  Description of Artificial Sequence: Synthetic epitope
RAVSANIREL

SEQ ID NO: 40360 - protein, 10 aa, Artificial Sequence
  Description of Artificial Sequence: Synthetic epitope
RAVSASALRF

SEQ ID NO: 40361 - protein, 10 aa, Artificial Sequence
  Description of Artificial Sequence: Synthetic epitope
RAVSQKFGGV

SEQ ID NO: 40362 - protein, 10 aa, Artificial Sequence
  Description of Artificial Sequence: Synthetic epitope
RAVSVKQREE

SEQ ID NO: 40363 - protein, 10 aa, Artificial Sequence
  Description of Artificial Sequence: Synthetic epitope
RAVTKKTSSL

SEQ ID NO: 40364 - protein, 10 aa, Artificial Sequence
  Description of Artificial Sequence: Synthetic epitope
RAVTSRQRAS

SEQ ID NO: 40365 - protein, 10 aa, Artificial Sequence
  Description of Artificial Sequence: Synthetic epitope
RAVTTVTQST

SEQ ID NO: 40366 - protein, 10 aa, Artificial Sequence
  Description of Artificial Sequence: Synthetic epitope
RAWFASEQMI

SEQ ID NO: 40367 - protein, 10 aa, Artificial Sequence
  Description of Artificial Sequence: Synthetic epitope
RAWGKVEVRP

SEQ ID NO: 40368 - protein, 10 aa, Artificial Sequence
  Description of Artificial Sequence: Synthetic epitope
RAYEKSGVEA

SEQ ID NO: 40369 - protein, 10 aa, Artificial Sequence
  Description of Artificial Sequence: Synthetic epitope
RAYSAERRSK

SEQ ID NO: 40370 - protein, 10 aa, Artificial Sequence
  Description of Artificial Sequence: Synthetic epitope
RAYSSFNPAM

SEQ ID NO: 40371 - protein, 10 aa, Artificial Sequence
  Description of Artificial Sequence: Synthetic epitope
RAYYEFREEA

SEQ ID NO: 40372 - protein, 10 aa, Artificial Sequence
  Description of Artificial Sequence: Synthetic epitope
RDAALERVQM

SEQ ID NO: 40373 - protein, 10 aa, Artificial Sequence
  Description of Artificial Sequence: Synthetic epitope
RDAALSAQGS

SEQ ID NO: 40374 - protein, 10 aa, Artificial Sequence
  Description of Artificial Sequence: Synthetic epitope
RDAASQNLKR

SEQ ID NO: 40375 - protein, 10 aa, Artificial Sequence
  Description of Artificial Sequence: Synthetic epitope
RDAASQNLKR

SEQ ID NO: 40376 - protein, 10 aa, Artificial Sequence
  Description of Artificial Sequence: Synthetic epitope
RDAASQNLKR

SEQ ID NO: 40377 - protein, 10 aa, Artificial Sequence
  Description of Artificial Sequence: Synthetic epitope
RDAEAEVLFS

SEQ ID NO: 40378 - protein, 10 aa, Artificial Sequence
  Description of Artificial Sequence: Synthetic epitope
RDAEQEKDRT

SEQ ID NO: 40379 - protein, 10 aa, Artificial Sequence
  Description of Artificial Sequence: Synthetic epitope
RDAIAKTDAT

SEQ ID NO: 40380 - protein, 10 aa, Artificial Sequence
  Description of Artificial Sequence: Synthetic epitope
RDAIELNAAN

SEQ ID NO: 40381 - protein, 10 aa, Artificial Sequence
  Description of Artificial Sequence: Synthetic epitope
RDALKSSVDA

SEQ ID NO: 40382 - protein, 10 aa, Artificial Sequence
  Description of Artificial Sequence: Synthetic epitope
RDALSISNAH

SEQ ID NO: 40383 - protein, 10 aa, Artificial Sequence
  Description of Artificial Sequence: Synthetic epitope
RDALSQLMNG

SEQ ID NO: 40384 - protein, 10 aa, Artificial Sequence
  Description of Artificial Sequence: Synthetic epitope
RDALSTLTNT

SEQ ID NO: 40385 - protein, 10 aa, Artificial Sequence
  Description of Artificial Sequence: Synthetic epitope
RDALTAEKSK

SEQ ID NO: 40386 - protein, 10 aa, Artificial Sequence
  Description of Artificial Sequence: Synthetic epitope
RDAPAESVAY

SEQ ID NO: 40387 - protein, 10 aa, Artificial Sequence
  Description of Artificial Sequence: Synthetic epitope
RDAVETNEKS

SEQ ID NO: 40388 - protein, 10 aa, Artificial Sequence
  Description of Artificial Sequence: Synthetic epitope
RDDEKSFSRR

SEQ ID NO: 40389 - protein, 10 aa, Artificial Sequence
  Description of Artificial Sequence: Synthetic epitope
RDDEVSEDEE

SEQ ID NO: 40390 - protein, 10 aa, Artificial Sequence
  Description of Artificial Sequence: Synthetic epitope
RDDGTQLADY

SEQ ID NO: 40391 - protein, 10 aa, Artificial Sequence
  Description of Artificial Sequence: Synthetic epitope
RDDIVQLKEA

SEQ ID NO: 40392 - protein, 10 aa, Artificial Sequence
  Description of Artificial Sequence: Synthetic epitope
RDDKKEVRAP

SEQ ID NO: 40393 - protein, 10 aa, Artificial Sequence
  Description of Artificial Sequence: Synthetic epitope
RDDNQTGQNG

SEQ ID NO: 40394 - protein, 10 aa, Artificial Sequence
  Description of Artificial Sequence: Synthetic epitope
RDDRDERESR

SEQ ID NO: 40395 - protein, 10 aa, Artificial Sequence
  Description of Artificial Sequence: Synthetic epitope
RDDTGKEKQK

SEQ ID NO: 40396 - protein, 10 aa, Artificial Sequence
  Description of Artificial Sequence: Synthetic epitope
RDDVKKVLLK

SEQ ID NO: 40397 - protein, 10 aa, Artificial Sequence
  Description of Artificial Sequence: Synthetic epitope
RDEAKTENRA

SEQ ID NO: 40398 - protein, 10 aa, Artificial Sequence
  Description of Artificial Sequence: Synthetic epitope
RDEHTASAAD

SEQ ID NO: 40399 - protein, 10 aa, Artificial Sequence
  Description of Artificial Sequence: Synthetic epitope
RDEINLAKQE

SEQ ID NO: 40400 - protein, 10 aa, Artificial Sequence
  Description of Artificial Sequence: Synthetic epitope
RDEKKIQRDA

SEQ ID NO: 40401 - protein, 10 aa, Artificial Sequence
  Description of Artificial Sequence: Synthetic epitope
RDEKKIQRDA

SEQ ID NO: 40402 - protein, 10 aa, Artificial Sequence
  Description of Artificial Sequence: Synthetic epitope
RDEKTNVRKS

SEQ ID NO: 40403 - protein, 10 aa, Artificial Sequence
  Description of Artificial Sequence: Synthetic epitope
RDESSVQSSR

SEQ ID NO: 40404 - protein, 10 aa, Artificial Sequence
  Description of Artificial Sequence: Synthetic epitope
RDETAKEADA

SEQ ID NO: 40405 - protein, 10 aa, Artificial Sequence
  Description of Artificial Sequence: Synthetic epitope
RDEVAVELSL

SEQ ID NO: 40406 - protein, 10 aa, Artificial Sequence
  Description of Artificial Sequence: Synthetic epitope
RDEVRRKKAV

SEQ ID NO: 40407 - protein, 10 aa, Artificial Sequence
  Description of Artificial Sequence: Synthetic epitope
RDFKKTAESK

SEQ ID NO: 40408 - protein, 10 aa, Artificial Sequence
  Description of Artificial Sequence: Synthetic epitope
RDFKKTKTRE

SEQ ID NO: 40409 - protein, 10 aa, Artificial Sequence
  Description of Artificial Sequence: Synthetic epitope
RDFKRDRETH

SEQ ID NO: 40410 - protein, 10 aa, Artificial Sequence
  Description of Artificial Sequence: Synthetic epitope
RDFQSEVLLS

SEQ ID NO: 40411 - protein, 10 aa, Artificial Sequence
  Description of Artificial Sequence: Synthetic epitope
RDFSEIKSQQ

SEQ ID NO: 40412 - protein, 10 aa, Artificial Sequence
  Description of Artificial Sequence: Synthetic epitope
RDGAKAEVGD

SEQ ID NO: 40413 - protein, 10 aa, Artificial Sequence
  Description of Artificial Sequence: Synthetic epitope
RDGASSMQRA

SEQ ID NO: 40414 - protein, 10 aa, Artificial Sequence
  Description of Artificial Sequence: Synthetic epitope
RDGEAKQYGG

SEQ ID NO: 40415 - protein, 10 aa, Artificial Sequence
  Description of Artificial Sequence: Synthetic epitope
RDGMNIVLNK

SEQ ID NO: 40416 - protein, 10 aa, Artificial Sequence
  Description of Artificial Sequence: Synthetic epitope
RDGVEASAEG

SEQ ID NO: 40417 - protein, 10 aa, Artificial Sequence
  Description of Artificial Sequence: Synthetic epitope
RDHNVRTPSN

SEQ ID NO: 40418 - protein, 10 aa, Artificial Sequence
  Description of Artificial Sequence: Synthetic epitope
RDIARHQASS

SEQ ID NO: 40419 - protein, 10 aa, Artificial Sequence
  Description of Artificial Sequence: Synthetic epitope
RDIATIVADK

SEQ ID NO: 40420 - protein, 10 aa, Artificial Sequence
  Description of Artificial Sequence: Synthetic epitope
RDIELKLGRK

SEQ ID NO: 40421 - protein, 10 aa, Artificial Sequence
  Description of Artificial Sequence: Synthetic epitope
RDIKDTTVGT

SEQ ID NO: 40422 - protein, 10 aa, Artificial Sequence
  Description of Artificial Sequence: Synthetic epitope
RDIKMPLRKH

SEQ ID NO: 40423 - protein, 10 aa, Artificial Sequence
  Description of Artificial Sequence: Synthetic epitope
RDILAEADNE

SEQ ID NO: 40424 - protein, 10 aa, Artificial Sequence
  Description of Artificial Sequence: Synthetic epitope
RDILAEADNE

SEQ ID NO: 40425 - protein, 10 aa, Artificial Sequence
  Description of Artificial Sequence: Synthetic epitope
RDIMSRSLLT

SEQ ID NO: 40426 - protein, 10 aa, Artificial Sequence
  Description of Artificial Sequence: Synthetic epitope
RDINKDRKDG

SEQ ID NO: 40427 - protein, 10 aa, Artificial Sequence
  Description of Artificial Sequence: Synthetic epitope
RDISETVSET

SEQ ID NO: 40428 - protein, 10 aa, Artificial Sequence
  Description of Artificial Sequence: Synthetic epitope
RDISNTLIML

SEQ ID NO: 40429 - protein, 10 aa, Artificial Sequence
  Description of Artificial Sequence: Synthetic epitope
RDISSTLIAL

SEQ ID NO: 40430 - protein, 10 aa, Artificial Sequence
  Description of Artificial Sequence: Synthetic epitope
RDITAARPSS

SEQ ID NO: 40431 - protein, 10 aa, Artificial Sequence
  Description of Artificial Sequence: Synthetic epitope
RDKADQLVKQ

SEQ ID NO: 40432 - protein, 10 aa, Artificial Sequence
  Description of Artificial Sequence: Synthetic epitope
RDKAVPSNAS

SEQ ID NO: 40433 - protein, 10 aa, Artificial Sequence
  Description of Artificial Sequence: Synthetic epitope
RDKNESLTMR

SEQ ID NO: 40434 - protein, 10 aa, Artificial Sequence
  Description of Artificial Sequence: Synthetic epitope
RDKRLEKMVS

SEQ ID NO: 40435 - protein, 10 aa, Artificial Sequence
  Description of Artificial Sequence: Synthetic epitope
RDKSKMVDPK

SEQ ID NO: 40436 - protein, 10 aa, Artificial Sequence
  Description of Artificial Sequence: Synthetic epitope
RDLALVSRDG

SEQ ID NO: 40437 - protein, 10 aa, Artificial Sequence
  Description of Artificial Sequence: Synthetic epitope
RDLANNLKSI

SEQ ID NO: 40438 - protein, 10 aa, Artificial Sequence
  Description of Artificial Sequence: Synthetic epitope
RDLEASSEPE

SEQ ID NO: 40439 - protein, 10 aa, Artificial Sequence
  Description of Artificial Sequence: Synthetic epitope
RDLEYKTVSV

SEQ ID NO: 40440 - protein, 10 aa, Artificial Sequence
  Description of Artificial Sequence: Synthetic epitope
RDLFNNSRSA

SEQ ID NO: 40441 - protein, 10 aa, Artificial Sequence
  Description of Artificial Sequence: Synthetic epitope
RDLFTASNDP

SEQ ID NO: 40442 - protein, 10 aa, Artificial Sequence
  Description of Artificial Sequence: Synthetic epitope
RDLFTSAHKN

SEQ ID NO: 40443 - protein, 10 aa, Artificial Sequence
  Description of Artificial Sequence: Synthetic epitope
RDLIEQSQSS

SEQ ID NO: 40444 - protein, 10 aa, Artificial Sequence
  Description of Artificial Sequence: Synthetic epitope
RDLILQLDYP

SEQ ID NO: 40445 - protein, 10 aa, Artificial Sequence
  Description of Artificial Sequence: Synthetic epitope
RDLKASLVNP

SEQ ID NO: 40446 - protein, 10 aa, Artificial Sequence
  Description of Artificial Sequence: Synthetic epitope
RDLLRLSTSS

SEQ ID NO: 40447 - protein, 10 aa, Artificial Sequence
  Description of Artificial Sequence: Synthetic epitope
RDLNAAEALQ

SEQ ID NO: 40448 - protein, 10 aa, Artificial Sequence
  Description of Artificial Sequence: Synthetic epitope
RDLPQYGQKQ

SEQ ID NO: 40449 - protein, 10 aa, Artificial Sequence
  Description of Artificial Sequence: Synthetic epitope
RDLPRAAVRI

SEQ ID NO: 40450 - protein, 10 aa, Artificial Sequence
  Description of Artificial Sequence: Synthetic epitope
RDLQFSEIRE

SEQ ID NO: 40451 - protein, 10 aa, Artificial Sequence
  Description of Artificial Sequence: Synthetic epitope
RDLQQAALTK

SEQ ID NO: 40452 - protein, 10 aa, Artificial Sequence
  Description of Artificial Sequence: Synthetic epitope
RDLSSVSQSQ

SEQ ID NO: 40453 - protein, 10 aa, Artificial Sequence
  Description of Artificial Sequence: Synthetic epitope
RDLTIQKADE

SEQ ID NO: 40454 - protein, 10 aa, Artificial Sequence
  Description of Artificial Sequence: Synthetic epitope
RDMKDQMSTS

SEQ ID NO: 40455 - protein, 10 aa, Artificial Sequence
  Description of Artificial Sequence: Synthetic epitope
RDMKVLKMSQ

SEQ ID NO: 40456 - protein, 10 aa, Artificial Sequence
  Description of Artificial Sequence: Synthetic epitope
RDMLDQVYQP

SEQ ID NO: 40457 - protein, 10 aa, Artificial Sequence
  Description of Artificial Sequence: Synthetic epitope
RDMMKKAIPK

SEQ ID NO: 40458 - protein, 10 aa, Artificial Sequence
  Description of Artificial Sequence: Synthetic epitope
RDNAVAEKER

SEQ ID NO: 40459 - protein, 10 aa, Artificial Sequence
  Description of Artificial Sequence: Synthetic epitope
RDNEIQMDMT

SEQ ID NO: 40460 - protein, 10 aa, Artificial Sequence
  Description of Artificial Sequence: Synthetic epitope
RDNGESEAHE

SEQ ID NO: 40461 - protein, 10 aa, Artificial Sequence
  Description of Artificial Sequence: Synthetic epitope
RDNLASTRKY

SEQ ID NO: 40462 - protein, 10 aa, Artificial Sequence
  Description of Artificial Sequence: Synthetic epitope
RDNLESSAMD

SEQ ID NO: 40463 - protein, 10 aa, Artificial Sequence
  Description of Artificial Sequence: Synthetic epitope
RDNLKTIKEA

SEQ ID NO: 40464 - protein, 10 aa, Artificial Sequence
  Description of Artificial Sequence: Synthetic epitope
RDNQAIEDNT

SEQ ID NO: 40465 - protein, 10 aa, Artificial Sequence
  Description of Artificial Sequence: Synthetic epitope
RDNRNAARNN

SEQ ID NO: 40466 - protein, 10 aa, Artificial Sequence
  Description of Artificial Sequence: Synthetic epitope
RDPAFKAANG

SEQ ID NO: 40467 - protein, 10 aa, Artificial Sequence
  Description of Artificial Sequence: Synthetic epitope
RDPALERRGT

SEQ ID NO: 40468 - protein, 10 aa, Artificial Sequence
  Description of Artificial Sequence: Synthetic epitope
RDPKSQRTHQ

SEQ ID NO: 40469 - protein, 10 aa, Artificial Sequence
  Description of Artificial Sequence: Synthetic epitope
RDPSIHYSPQ

SEQ ID NO: 40470 - protein, 10 aa, Artificial Sequence
  Description of Artificial Sequence: Synthetic epitope
RDPTQAIANR

SEQ ID NO: 40471 - protein, 10 aa, Artificial Sequence
  Description of Artificial Sequence: Synthetic epitope
RDQALKALRA

SEQ ID NO: 40472 - protein, 10 aa, Artificial Sequence
  Description of Artificial Sequence: Synthetic epitope
RDQEAAVAEL

SEQ ID NO: 40473 - protein, 10 aa, Artificial Sequence
  Description of Artificial Sequence: Synthetic epitope
RDQIVSVQEE

SEQ ID NO: 40474 - protein, 10 aa, Artificial Sequence
  Description of Artificial Sequence: Synthetic epitope
RDQKQRTQVQ

SEQ ID NO: 40475 - protein, 10 aa, Artificial Sequence
  Description of Artificial Sequence: Synthetic epitope
RDQREQLKAE

SEQ ID NO: 40476 - protein, 10 aa, Artificial Sequence
  Description of Artificial Sequence: Synthetic epitope
RDQSKGILKI

SEQ ID NO: 40477 - protein, 10 aa, Artificial Sequence
  Description of Artificial Sequence: Synthetic epitope
RDQTDALEPM

SEQ ID NO: 40478 - protein, 10 aa, Artificial Sequence
  Description of Artificial Sequence: Synthetic epitope
RDQVIKQKEE

SEQ ID NO: 40479 - protein, 10 aa, Artificial Sequence
  Description of Artificial Sequence: Synthetic epitope
RDREDQLQTT

SEQ ID NO: 40480 - protein, 10 aa, Artificial Sequence
  Description of Artificial Sequence: Synthetic epitope
RDRETSSIEP

SEQ ID NO: 40481 - protein, 10 aa, Artificial Sequence
  Description of Artificial Sequence: Synthetic epitope
RDRFAESPHH

SEQ ID NO: 40482 - protein, 10 aa, Artificial Sequence
  Description of Artificial Sequence: Synthetic epitope
RDRFIVTDLS

SEQ ID NO: 40483 - protein, 10 aa, Artificial Sequence
  Description of Artificial Sequence: Synthetic epitope
RDRGARIGSR

SEQ ID NO: 40484 - protein, 10 aa, Artificial Sequence
  Description of Artificial Sequence: Synthetic epitope
RDRHLVSLQP

SEQ ID NO: 40485 - protein, 10 aa, Artificial Sequence
  Description of Artificial Sequence: Synthetic epitope
RDRIGAKRQR

SEQ ID NO: 40486 - protein, 10 aa, Artificial Sequence
  Description of Artificial Sequence: Synthetic epitope
RDRIQMASTR

SEQ ID NO: 40487 - protein, 10 aa, Artificial Sequence
  Description of Artificial Sequence: Synthetic epitope
RDRKQRSLEK

SEQ ID NO: 40488 - protein, 10 aa, Artificial Sequence
  Description of Artificial Sequence: Synthetic epitope
RDRLGMSSVT

SEQ ID NO: 40489 - protein, 10 aa, Artificial Sequence
  Description of Artificial Sequence: Synthetic epitope
RDRLKTEPFE

SEQ ID NO: 40490 - protein, 10 aa, Artificial Sequence
  Description of Artificial Sequence: Synthetic epitope
RDRLRKAISK

SEQ ID NO: 40491 - protein, 10 aa, Artificial Sequence
  Description of Artificial Sequence: Synthetic epitope
RDRLTKQEFQ

SEQ ID NO: 40492 - protein, 10 aa, Artificial Sequence
  Description of Artificial Sequence: Synthetic epitope
RDRNVIETKE

SEQ ID NO: 40493 - protein, 10 aa, Artificial Sequence
  Description of Artificial Sequence: Synthetic epitope
RDRSGSSQST

SEQ ID NO: 40494 - protein, 10 aa, Artificial Sequence
  Description of Artificial Sequence: Synthetic epitope
RDRVTPIKKT

SEQ ID NO: 40495 - protein, 10 aa, Artificial Sequence
  Description of Artificial Sequence: Synthetic epitope
RDSAARGPTI

SEQ ID NO: 40496 - protein, 10 aa, Artificial Sequence
  Description of Artificial Sequence: Synthetic epitope
RDSAGAMKQI

SEQ ID NO: 40497 - protein, 10 aa, Artificial Sequence
  Description of Artificial Sequence: Synthetic epitope
RDSASEEVFT

SEQ ID NO: 40498 - protein, 10 aa, Artificial Sequence
  Description of Artificial Sequence: Synthetic epitope
RDSAVAAPVL

SEQ ID NO: 40499 - protein, 10 aa, Artificial Sequence
  Description of Artificial Sequence: Synthetic epitope
RDSDSLAESE

SEQ ID NO: 40500 - protein, 10 aa, Artificial Sequence
  Description of Artificial Sequence: Synthetic epitope
RDSEEQRASS

SEQ ID NO: 40501 - protein, 10 aa, Artificial Sequence
  Description of Artificial Sequence: Synthetic epitope
RDSEPSSTVS

SEQ ID NO: 40502 - protein, 10 aa, Artificial Sequence
  Description of Artificial Sequence: Synthetic epitope
RDSETRVDLK

SEQ ID NO: 40503 - protein, 10 aa, Artificial Sequence
  Description of Artificial Sequence: Synthetic epitope
RDSFAQQLHQ

SEQ ID NO: 40504 - protein, 10 aa, Artificial Sequence
  Description of Artificial Sequence: Synthetic epitope
RDSGIARSAS

SEQ ID NO: 40505 - protein, 10 aa, Artificial Sequence
  Description of Artificial Sequence: Synthetic epitope
RDSGLSQKEE

SEQ ID NO: 40506 - protein, 10 aa, Artificial Sequence
  Description of Artificial Sequence: Synthetic epitope
RDSGQDSSKH

SEQ ID NO: 40507 - protein, 10 aa, Artificial Sequence
  Description of Artificial Sequence: Synthetic epitope
RDSGQSKSDK

SEQ ID NO: 40508 - protein, 10 aa, Artificial Sequence
  Description of Artificial Sequence: Synthetic epitope
RDSILRSDEA

SEQ ID NO: 40509 - protein, 10 aa, Artificial Sequence
  Description of Artificial Sequence: Synthetic epitope
RDSKDTQTRI

SEQ ID NO: 40510 - protein, 10 aa, Artificial Sequence
  Description of Artificial Sequence: Synthetic epitope
RDSKKEKKHS

SEQ ID NO: 40511 - protein, 10 aa, Artificial Sequence
  Description of Artificial Sequence: Synthetic epitope
RDSKKRSKQR

SEQ ID NO: 40512 - protein, 10 aa, Artificial Sequence
  Description of Artificial Sequence: Synthetic epitope
RDSLALQSGQ

SEQ ID NO: 40513 - protein, 10 aa, Artificial Sequence
  Description of Artificial Sequence: Synthetic epitope
RDSLDKKNQH

SEQ ID NO: 40514 - protein, 10 aa, Artificial Sequence
  Description of Artificial Sequence: Synthetic epitope
RDSNATAAKM

SEQ ID NO: 40515 - protein, 10 aa, Artificial Sequence
  Description of Artificial Sequence: Synthetic epitope
RDSQMQNPYS

SEQ ID NO: 40516 - protein, 10 aa, Artificial Sequence
  Description of Artificial Sequence: Synthetic epitope
RDSSPLKDSG

SEQ ID NO: 40517 - protein, 10 aa, Artificial Sequence
  Description of Artificial Sequence: Synthetic epitope
RDSVAQAELR

SEQ ID NO: 40518 - protein, 10 aa, Artificial Sequence
  Description of Artificial Sequence: Synthetic epitope
RDSVLTSKNQ

SEQ ID NO: 40519 - protein, 10 aa, Artificial Sequence
  Description of Artificial Sequence: Synthetic epitope
RDSVSSVSDI

SEQ ID NO: 40520 - protein, 10 aa, Artificial Sequence
  Description of Artificial Sequence: Synthetic epitope
RDSVVLSLLK

SEQ ID NO: 40521 - protein, 10 aa, Artificial Sequence
  Description of Artificial Sequence: Synthetic epitope
RDSYKSKAPS

SEQ ID NO: 40522 - protein, 10 aa, Artificial Sequence
  Description of Artificial Sequence: Synthetic epitope
RDTAAEMNET

SEQ ID NO: 40523 - protein, 10 aa, Artificial Sequence
  Description of Artificial Sequence: Synthetic epitope
RDTLAAISEV

SEQ ID NO: 40524 - protein, 10 aa, Artificial Sequence
  Description of Artificial Sequence: Synthetic epitope
RDTPKVMEPI

SEQ ID NO: 40525 - protein, 10 aa, Artificial Sequence
  Description of Artificial Sequence: Synthetic epitope
RDTQSVRPPG

SEQ ID NO: 40526 - protein, 10 aa, Artificial Sequence
  Description of Artificial Sequence: Synthetic epitope
RDTSAAQKPT

SEQ ID NO: 40527 - protein, 10 aa, Artificial Sequence
  Description of Artificial Sequence: Synthetic epitope
RDTTRMENPE

SEQ ID NO: 40528 - protein, 10 aa, Artificial Sequence
  Description of Artificial Sequence: Synthetic epitope
RDTVTSELAA

SEQ ID NO: 40529 - protein, 10 aa, Artificial Sequence
  Description of Artificial Sequence: Synthetic epitope
RDVAHFGIRV

SEQ ID NO: 40530 - protein, 10 aa, Artificial Sequence
  Description of Artificial Sequence: Synthetic epitope
RDVAQLSRTS

SEQ ID NO: 40531 - protein, 10 aa, Artificial Sequence
  Description of Artificial Sequence: Synthetic epitope
RDVGGQLQRL

SEQ ID NO: 40532 - protein, 10 aa, Artificial Sequence
  Description of Artificial Sequence: Synthetic epitope
RDVHKGMFAT

SEQ ID NO: 40533 - protein, 10 aa, Artificial Sequence
  Description of Artificial Sequence: Synthetic epitope
RDVISSVEEG

SEQ ID NO: 40534 - protein, 10 aa, Artificial Sequence
  Description of Artificial Sequence: Synthetic epitope
RDVLKLKKGQ

SEQ ID NO: 40535 - protein, 10 aa, Artificial Sequence
  Description of Artificial Sequence: Synthetic epitope
RDVMASAALA

SEQ ID NO: 40536 - protein, 10 aa, Artificial Sequence
  Description of Artificial Sequence: Synthetic epitope
RDVRVSVKAL

SEQ ID NO: 40537 - protein, 10 aa, Artificial Sequence
  Description of Artificial Sequence: Synthetic epitope
RDVSLDKRSD

SEQ ID NO: 40538 - protein, 10 aa, Artificial Sequence
  Description of Artificial Sequence: Synthetic epitope
RDVTTVWKLR

SEQ ID NO: 40539 - protein, 10 aa, Artificial Sequence
  Description of Artificial Sequence: Synthetic epitope
RDWALPSRGQ

SEQ ID NO: 40540 - protein, 10 aa, Artificial Sequence
  Description of Artificial Sequence: Synthetic epitope
RDWELLPSAA

SEQ ID NO: 40541 - protein, 10 aa, Artificial Sequence
  Description of Artificial Sequence: Synthetic epitope
RDWGQNEAAD

SEQ ID NO: 40542 - protein, 10 aa, Artificial Sequence
  Description of Artificial Sequence: Synthetic epitope
RDWSALQQKY

SEQ ID NO: 40543 - protein, 10 aa, Artificial Sequence
  Description of Artificial Sequence: Synthetic epitope
RDYGESNVNL

SEQ ID NO: 40544 - protein, 10 aa, Artificial Sequence
  Description of Artificial Sequence: Synthetic epitope
RDYVANGGWE

SEQ ID NO: 40545 - protein, 10 aa, Artificial Sequence
  Description of Artificial Sequence: Synthetic epitope
REAAEYIAQA

SEQ ID NO: 40546 - protein, 10 aa, Artificial Sequence
  Description of Artificial Sequence: Synthetic epitope
REAALASEPD

SEQ ID NO: 40547 - protein, 10 aa, Artificial Sequence
  Description of Artificial Sequence: Synthetic epitope
REAARDARAQ

SEQ ID NO: 40548 - protein, 10 aa, Artificial Sequence
  Description of Artificial Sequence: Synthetic epitope
REAATAVEQE

SEQ ID NO: 40549 - protein, 10 aa, Artificial Sequence
  Description of Artificial Sequence: Synthetic epitope
REAATNQAKI

SEQ ID NO: 40550 - protein, 10 aa, Artificial Sequence
  Description of Artificial Sequence: Synthetic epitope
REAATQGAKI

SEQ ID NO: 40551 - protein, 10 aa, Artificial Sequence
  Description of Artificial Sequence: Synthetic epitope
REAEAELSGE

SEQ ID NO: 40552 - protein, 10 aa, Artificial Sequence
  Description of Artificial Sequence: Synthetic epitope
REAEAKMQES

SEQ ID NO: 40553 - protein, 10 aa, Artificial Sequence
  Description of Artificial Sequence: Synthetic epitope
REAEANRRPL

SEQ ID NO: 40554 - protein, 10 aa, Artificial Sequence
  Description of Artificial Sequence: Synthetic epitope
REAEARKQSQ

SEQ ID NO: 40555 - protein, 10 aa, Artificial Sequence
  Description of Artificial Sequence: Synthetic epitope
REAEATALHL

SEQ ID NO: 40556 - protein, 10 aa, Artificial Sequence
  Description of Artificial Sequence: Synthetic epitope
REAERKQQLY

SEQ ID NO: 40557 - protein, 10 aa, Artificial Sequence
  Description of Artificial Sequence: Synthetic epitope
REAESLIAKK

SEQ ID NO: 40558 - protein, 10 aa, Artificial Sequence
  Description of Artificial Sequence: Synthetic epitope
REAFSTEPRF

SEQ ID NO: 40559 - protein, 10 aa, Artificial Sequence
  Description of Artificial Sequence: Synthetic epitope
REAGIMLSDD

SEQ ID NO: 40560 - protein, 10 aa, Artificial Sequence
  Description of Artificial Sequence: Synthetic epitope
REAGKLEAAK

SEQ ID NO: 40561 - protein, 10 aa, Artificial Sequence
  Description of Artificial Sequence: Synthetic epitope
REAIAELERE

SEQ ID NO: 40562 - protein, 10 aa, Artificial Sequence
  Description of Artificial Sequence: Synthetic epitope
REAIKRIAYE

SEQ ID NO: 40563 - protein, 10 aa, Artificial Sequence
  Description of Artificial Sequence: Synthetic epitope
REALESSHLE

SEQ ID NO: 40564 - protein, 10 aa, Artificial Sequence
  Description of Artificial Sequence: Synthetic epitope
REALEVAVAG

SEQ ID NO: 40565 - protein, 10 aa, Artificial Sequence
  Description of Artificial Sequence: Synthetic epitope
REALKQSATD

SEQ ID NO: 40566 - protein, 10 aa, Artificial Sequence
  Description of Artificial Sequence: Synthetic epitope
REALKVKAGT

SEQ ID NO: 40567 - protein, 10 aa, Artificial Sequence
  Description of Artificial Sequence: Synthetic epitope
REALPTLKLR

SEQ ID NO: 40568 - protein, 10 aa, Artificial Sequence
  Description of Artificial Sequence: Synthetic epitope
REALQSQQAG

SEQ ID NO: 40569 - protein, 10 aa, Artificial Sequence
  Description of Artificial Sequence: Synthetic epitope
REANALAAGH

SEQ ID NO: 40570 - protein, 10 aa, Artificial Sequence
  Description of Artificial Sequence: Synthetic epitope
REAQELNSRN

SEQ ID NO: 40571 - protein, 10 aa, Artificial Sequence
  Description of Artificial Sequence: Synthetic epitope
REAQQVQAEQ

SEQ ID NO: 40572 - protein, 10 aa, Artificial Sequence
  Description of Artificial Sequence: Synthetic epitope
REAQSLISAA

SEQ ID NO: 40573 - protein, 10 aa, Artificial Sequence
  Description of Artificial Sequence: Synthetic epitope
REAQTLSLEA

SEQ ID NO: 40574 - protein, 10 aa, Artificial Sequence
  Description of Artificial Sequence: Synthetic epitope
REAQYSMLAT

SEQ ID NO: 40575 - protein, 10 aa, Artificial Sequence
  Description of Artificial Sequence: Synthetic epitope
REARASANGQ

SEQ ID NO: 40576 - protein, 10 aa, Artificial Sequence
  Description of Artificial Sequence: Synthetic epitope
REASALTAEG

SEQ ID NO: 40577 - protein, 10 aa, Artificial Sequence
  Description of Artificial Sequence: Synthetic epitope
REASEAAKTS

SEQ ID NO: 40578 - protein, 10 aa, Artificial Sequence
  Description of Artificial Sequence: Synthetic epitope
REASSESDSI

SEQ ID NO: 40579 - protein, 10 aa, Artificial Sequence
  Description of Artificial Sequence: Synthetic epitope
REASSTQQET

SEQ ID NO: 40580 - protein, 10 aa, Artificial Sequence
  Description of Artificial Sequence: Synthetic epitope
REASSVSEEL

SEQ ID NO: 40581 - protein, 10 aa, Artificial Sequence
  Description of Artificial Sequence: Synthetic epitope
REASVNLGSE

SEQ ID NO: 40582 - protein, 10 aa, Artificial Sequence
  Description of Artificial Sequence: Synthetic epitope
REATASLVSF

SEQ ID NO: 40583 - protein, 10 aa, Artificial Sequence
  Description of Artificial Sequence: Synthetic epitope
REATQNSSQF

SEQ ID NO: 40584 - protein, 10 aa, Artificial Sequence
  Description of Artificial Sequence: Synthetic epitope
REAVNSLQEE

SEQ ID NO: 40585 - protein, 10 aa, Artificial Sequence
  Description of Artificial Sequence: Synthetic epitope
REDARDPVTR

SEQ ID NO: 40586 - protein, 10 aa, Artificial Sequence
  Description of Artificial Sequence: Synthetic epitope
REDDTTLVTA

SEQ ID NO: 40587 - protein, 10 aa, Artificial Sequence
  Description of Artificial Sequence: Synthetic epitope
REDEMAADGD

SEQ ID NO: 40588 - protein, 10 aa, Artificial Sequence
  Description of Artificial Sequence: Synthetic epitope
REDFMSVLSD

SEQ ID NO: 40589 - protein, 10 aa, Artificial Sequence
  Description of Artificial Sequence: Synthetic epitope
REDHYSTWEQ

SEQ ID NO: 40590 - protein, 10 aa, Artificial Sequence
  Description of Artificial Sequence: Synthetic epitope
REDLEVHQAK

SEQ ID NO: 40591 - protein, 10 aa, Artificial Sequence
  Description of Artificial Sequence: Synthetic epitope
REDLVAVEEI

SEQ ID NO: 40592 - protein, 10 aa, Artificial Sequence
  Description of Artificial Sequence: Synthetic epitope
REDMSLAQSP

SEQ ID NO: 40593 - protein, 10 aa, Artificial Sequence
  Description of Artificial Sequence: Synthetic epitope
REDQIIRLEK

SEQ ID NO: 40594 - protein, 10 aa, Artificial Sequence
  Description of Artificial Sequence: Synthetic epitope
REDSDMAQDS

SEQ ID NO: 40595 - protein, 10 aa, Artificial Sequence
  Description of Artificial Sequence: Synthetic epitope
REDSKEAEKS

SEQ ID NO: 40596 - protein, 10 aa, Artificial Sequence
  Description of Artificial Sequence: Synthetic epitope
REDSNDKISE

SEQ ID NO: 40597 - protein, 10 aa, Artificial Sequence
  Description of Artificial Sequence: Synthetic epitope
REDTRIKPIY

SEQ ID NO: 40598 - protein, 10 aa, Artificial Sequence
  Description of Artificial Sequence: Synthetic epitope
REDVLDSQAL

SEQ ID NO: 40599 - protein, 10 aa, Artificial Sequence
  Description of Artificial Sequence: Synthetic epitope
REEAAEHIPL

SEQ ID NO: 40600 - protein, 10 aa, Artificial Sequence
  Description of Artificial Sequence: Synthetic epitope
REEAASKGHV

SEQ ID NO: 40601 - protein, 10 aa, Artificial Sequence
  Description of Artificial Sequence: Synthetic epitope
REEAKSLTPK

SEQ ID NO: 40602 - protein, 10 aa, Artificial Sequence
  Description of Artificial Sequence: Synthetic epitope
REEATKANQT

SEQ ID NO: 40603 - protein, 10 aa, Artificial Sequence
  Description of Artificial Sequence: Synthetic epitope
REEDGHLFSQ

SEQ ID NO: 40604 - protein, 10 aa, Artificial Sequence
  Description of Artificial Sequence: Synthetic epitope
REEIIPVAAE

SEQ ID NO: 40605 - protein, 10 aa, Artificial Sequence
  Description of Artificial Sequence: Synthetic epitope
REEIKSEPSK

SEQ ID NO: 40606 - protein, 10 aa, Artificial Sequence
  Description of Artificial Sequence: Synthetic epitope
REEIRLVKQK

SEQ ID NO: 40607 - protein, 10 aa, Artificial Sequence
  Description of Artificial Sequence: Synthetic epitope
REEKLLTERE

SEQ ID NO: 40608 - protein, 10 aa, Artificial Sequence
  Description of Artificial Sequence: Synthetic epitope
REEKVLMDEG

SEQ ID NO: 40609 - protein, 10 aa, Artificial Sequence
  Description of Artificial Sequence: Synthetic epitope
REELDAKFNA

SEQ ID NO: 40610 - protein, 10 aa, Artificial Sequence
  Description of Artificial Sequence: Synthetic epitope
REELSAAPMD

SEQ ID NO: 40611 - protein, 10 aa, Artificial Sequence
  Description of Artificial Sequence: Synthetic epitope
REELSALVAP

SEQ ID NO: 40612 - protein, 10 aa, Artificial Sequence
  Description of Artificial Sequence: Synthetic epitope
REENAATQAR

SEQ ID NO: 40613 - protein, 10 aa, Artificial Sequence
  Description of Artificial Sequence: Synthetic epitope
REENRALQQL

SEQ ID NO: 40614 - protein, 10 aa, Artificial Sequence
  Description of Artificial Sequence: Synthetic epitope
REENSSEASD

SEQ ID NO: 40615 - protein, 10 aa, Artificial Sequence
  Description of Artificial Sequence: Synthetic epitope
REEPSARTSR

SEQ ID NO: 40616 - protein, 10 aa, Artificial Sequence
  Description of Artificial Sequence: Synthetic epitope
REEQGAAFLA

SEQ ID NO: 40617 - protein, 10 aa, Artificial Sequence
  Description of Artificial Sequence: Synthetic epitope
REEQGNQTAE

SEQ ID NO: 40618 - protein, 10 aa, Artificial Sequence
  Description of Artificial Sequence: Synthetic epitope
REEQISIDFQ

SEQ ID NO: 40619 - protein, 10 aa, Artificial Sequence
  Description of Artificial Sequence: Synthetic epitope
REEREINSKK

SEQ ID NO: 40620 - protein, 10 aa, Artificial Sequence
  Description of Artificial Sequence: Synthetic epitope
REERKVNSNN

SEQ ID NO: 40621 - protein, 10 aa, Artificial Sequence
  Description of Artificial Sequence: Synthetic epitope
REESVMLGTV

SEQ ID NO: 40622 - protein, 10 aa, Artificial Sequence
  Description of Artificial Sequence: Synthetic epitope
REESVNSNRY

SEQ ID NO: 40623 - protein, 10 aa, Artificial Sequence
  Description of Artificial Sequence: Synthetic epitope
REETLASSVA

SEQ ID NO: 40624 - protein, 10 aa, Artificial Sequence
  Description of Artificial Sequence: Synthetic epitope
REEVLSLRSS

SEQ ID NO: 40625 - protein, 10 aa, Artificial Sequence
  Description of Artificial Sequence: Synthetic epitope
REFASENTNH

SEQ ID NO: 40626 - protein, 10 aa, Artificial Sequence
  Description of Artificial Sequence: Synthetic epitope
REFEALTEEN

SEQ ID NO: 40627 - protein, 10 aa, Artificial Sequence
  Description of Artificial Sequence: Synthetic epitope
REFRKALKSL

SEQ ID NO: 40628 - protein, 10 aa, Artificial Sequence
  Description of Artificial Sequence: Synthetic epitope
REFRLTESST

SEQ ID NO: 40629 - protein, 10 aa, Artificial Sequence
  Description of Artificial Sequence: Synthetic epitope
REGDKSQAFQ

SEQ ID NO: 40630 - protein, 10 aa, Artificial Sequence
  Description of Artificial Sequence: Synthetic epitope
REGDNHNIDS

SEQ ID NO: 40631 - protein, 10 aa, Artificial Sequence
  Description of Artificial Sequence: Synthetic epitope
REGKTTELTA

SEQ ID NO: 40632 - protein, 10 aa, Artificial Sequence
  Description of Artificial Sequence: Synthetic epitope
REGLLATAIP

SEQ ID NO: 40633 - protein, 10 aa, Artificial Sequence
  Description of Artificial Sequence: Synthetic epitope
REGNQDKFSY

SEQ ID NO: 40634 - protein, 10 aa, Artificial Sequence
  Description of Artificial Sequence: Synthetic epitope
REGPMFEAMI

SEQ ID NO: 40635 - protein, 10 aa, Artificial Sequence
  Description of Artificial Sequence: Synthetic epitope
REGQSAPLLS

SEQ ID NO: 40636 - protein, 10 aa, Artificial Sequence
  Description of Artificial Sequence: Synthetic epitope
REGQTAEVPN

SEQ ID NO: 40637 - protein, 10 aa, Artificial Sequence
  Description of Artificial Sequence: Synthetic epitope
REGRSARRAA

SEQ ID NO: 40638 - protein, 10 aa, Artificial Sequence
  Description of Artificial Sequence: Synthetic epitope
REGSRPMMGD

SEQ ID NO: 40639 - protein, 10 aa, Artificial Sequence
  Description of Artificial Sequence: Synthetic epitope
REGSSAQALA

SEQ ID NO: 40640 - protein, 10 aa, Artificial Sequence
  Description of Artificial Sequence: Synthetic epitope
REGSSESETS

SEQ ID NO: 40641 - protein, 10 aa, Artificial Sequence
  Description of Artificial Sequence: Synthetic epitope
REGTSQLASP

SEQ ID NO: 40642 - protein, 10 aa, Artificial Sequence
  Description of Artificial Sequence: Synthetic epitope
REGTSRSLKV

SEQ ID NO: 40643 - protein, 10 aa, Artificial Sequence
  Description of Artificial Sequence: Synthetic epitope
REGVMHQVKH

SEQ ID NO: 40644 - protein, 10 aa, Artificial Sequence
  Description of Artificial Sequence: Synthetic epitope
REGVVEIVRG

SEQ ID NO: 40645 - protein, 10 aa, Artificial Sequence
  Description of Artificial Sequence: Synthetic epitope
REHDVRKPKE

SEQ ID NO: 40646 - protein, 10 aa, Artificial Sequence
  Description of Artificial Sequence: Synthetic epitope
REHEEPTTSE

SEQ ID NO: 40647 - protein, 10 aa, Artificial Sequence
  Description of Artificial Sequence: Synthetic epitope
REHEIGEWEA

SEQ ID NO: 40648 - protein, 10 aa, Artificial Sequence
  Description of Artificial Sequence: Synthetic epitope
REHGSNKKLA

SEQ ID NO: 40649 - protein, 10 aa, Artificial Sequence
  Description of Artificial Sequence: Synthetic epitope
REHQTKAKQL

SEQ ID NO: 40650 - protein, 10 aa, Artificial Sequence
  Description of Artificial Sequence: Synthetic epitope
REIEEQLRAE

SEQ ID NO: 40651 - protein, 10 aa, Artificial Sequence
  Description of Artificial Sequence: Synthetic epitope
REIESIKDSS

SEQ ID NO: 40652 - protein, 10 aa, Artificial Sequence
  Description of Artificial Sequence: Synthetic epitope
REIISNLAKA

SEQ ID NO: 40653 - protein, 10 aa, Artificial Sequence
  Description of Artificial Sequence: Synthetic epitope
REIKTDFSLS

SEQ ID NO: 40654 - protein, 10 aa, Artificial Sequence
  Description of Artificial Sequence: Synthetic epitope
REILAKSNAS

SEQ ID NO: 40655 - protein, 10 aa, Artificial Sequence
  Description of Artificial Sequence: Synthetic epitope
REIRKKESMP

SEQ ID NO: 40656 - protein, 10 aa, Artificial Sequence
  Description of Artificial Sequence: Synthetic epitope
REIRMLAGEV

SEQ ID NO: 40657 - protein, 10 aa, Artificial Sequence
  Description of Artificial Sequence: Synthetic epitope
REIRPNSTVQ

SEQ ID NO: 40658 - protein, 10 aa, Artificial Sequence
  Description of Artificial Sequence: Synthetic epitope
REIRRYQKST

SEQ ID NO: 40659 - protein, 10 aa, Artificial Sequence
  Description of Artificial Sequence: Synthetic epitope
REIRTKKMSE

SEQ ID NO: 40660 - protein, 10 aa, Artificial Sequence
  Description of Artificial Sequence: Synthetic epitope
REISALVANS

SEQ ID NO: 40661 - protein, 10 aa, Artificial Sequence
  Description of Artificial Sequence: Synthetic epitope
REISRMSTLK

SEQ ID NO: 40662 - protein, 10 aa, Artificial Sequence
  Description of Artificial Sequence: Synthetic epitope
REISSMEKLH

SEQ ID NO: 40663 - protein, 10 aa, Artificial Sequence
  Description of Artificial Sequence: Synthetic epitope
REITEKTSKN

SEQ ID NO: 40664 - protein, 10 aa, Artificial Sequence
  Description of Artificial Sequence: Synthetic epitope
REITFLKNTV

SEQ ID NO: 40665 - protein, 10 aa, Artificial Sequence
  Description of Artificial Sequence: Synthetic epitope
REIVAISSAQ

SEQ ID NO: 40666 - protein, 10 aa, Artificial Sequence
  Description of Artificial Sequence: Synthetic epitope
REIVSQTTAT

SEQ ID NO: 40667 - protein, 10 aa, Artificial Sequence
  Description of Artificial Sequence: Synthetic epitope
REKAESEKQT

SEQ ID NO: 40668 - protein, 10 aa, Artificial Sequence
  Description of Artificial Sequence: Synthetic epitope
REKALLAQLW

SEQ ID NO: 40669 - protein, 10 aa, Artificial Sequence
  Description of Artificial Sequence: Synthetic epitope
REKAVNIPLD

SEQ ID NO: 40670 - protein, 10 aa, Artificial Sequence
  Description of Artificial Sequence: Synthetic epitope
REKDEREEQL

SEQ ID NO: 40671 - protein, 10 aa, Artificial Sequence
  Description of Artificial Sequence: Synthetic epitope
REKEYEEKKN

SEQ ID NO: 40672 - protein, 10 aa, Artificial Sequence
  Description of Artificial Sequence: Synthetic epitope
REKGKISNKK

SEQ ID NO: 40673 - protein, 10 aa, Artificial Sequence
  Description of Artificial Sequence: Synthetic epitope
REKGLSLIEA

SEQ ID NO: 40674 - protein, 10 aa, Artificial Sequence
  Description of Artificial Sequence: Synthetic epitope
REKHQASQKE

SEQ ID NO: 40675 - protein, 10 aa, Artificial Sequence
  Description of Artificial Sequence: Synthetic epitope
REKITLSNSW

SEQ ID NO: 40676 - protein, 10 aa, Artificial Sequence
  Description of Artificial Sequence: Synthetic epitope
REKIVSDENS

SEQ ID NO: 40677 - protein, 10 aa, Artificial Sequence
  Description of Artificial Sequence: Synthetic epitope
REKKISRSSA

SEQ ID NO: 40678 - protein, 10 aa, Artificial Sequence
  Description of Artificial Sequence: Synthetic epitope
REKKNKIMQA

SEQ ID NO: 40679 - protein, 10 aa, Artificial Sequence
  Description of Artificial Sequence: Synthetic epitope
REKLVRAQGH

SEQ ID NO: 40680 - protein, 10 aa, Artificial Sequence
  Description of Artificial Sequence: Synthetic epitope
REKMSVRDHD

SEQ ID NO: 40681 - protein, 10 aa, Artificial Sequence
  Description of Artificial Sequence: Synthetic epitope
REKNEALLGE

SEQ ID NO: 40682 - protein, 10 aa, Artificial Sequence
  Description of Artificial Sequence: Synthetic epitope
REKNESNKSS

SEQ ID NO: 40683 - protein, 10 aa, Artificial Sequence
  Description of Artificial Sequence: Synthetic epitope
REKNLVALEE

SEQ ID NO: 40684 - protein, 10 aa, Artificial Sequence
  Description of Artificial Sequence: Synthetic epitope
REKPLSTKSK

SEQ ID NO: 40685 - protein, 10 aa, Artificial Sequence
  Description of Artificial Sequence: Synthetic epitope
REKQDETQTK

SEQ ID NO: 40686 - protein, 10 aa, Artificial Sequence
  Description of Artificial Sequence: Synthetic epitope
REKQHTKAIE

SEQ ID NO: 40687 - protein, 10 aa, Artificial Sequence
  Description of Artificial Sequence: Synthetic epitope
REKQKIAFTE

SEQ ID NO: 40688 - protein, 10 aa, Artificial Sequence
  Description of Artificial Sequence: Synthetic epitope
REKQPPIDNI

SEQ ID NO: 40689 - protein, 10 aa, Artificial Sequence
  Description of Artificial Sequence: Synthetic epitope
REKRMSNELE

SEQ ID NO: 40690 - protein, 10 aa, Artificial Sequence
  Description of Artificial Sequence: Synthetic epitope
REKRQAKHKQ

SEQ ID NO: 40691 - protein, 10 aa, Artificial Sequence
  Description of Artificial Sequence: Synthetic epitope
REKRRSLQLP

SEQ ID NO: 40692 - protein, 10 aa, Artificial Sequence
  Description of Artificial Sequence: Synthetic epitope
REKRTSQSAR

SEQ ID NO: 40693 - protein, 10 aa, Artificial Sequence
  Description of Artificial Sequence: Synthetic epitope
REKSLVAQLA

SEQ ID NO: 40694 - protein, 10 aa, Artificial Sequence
  Description of Artificial Sequence: Synthetic epitope
REKVLTTERE

SEQ ID NO: 40695 - protein, 10 aa, Artificial Sequence
  Description of Artificial Sequence: Synthetic epitope
REKVRPKMGK

SEQ ID NO: 40696 - protein, 10 aa, Artificial Sequence
  Description of Artificial Sequence: Synthetic epitope
REKVTVMSTI

SEQ ID NO: 40697 - protein, 10 aa, Artificial Sequence
  Description of Artificial Sequence: Synthetic epitope
RELARRKDKE

SEQ ID NO: 40698 - protein, 10 aa, Artificial Sequence
  Description of Artificial Sequence: Synthetic epitope
RELASKTREK

SEQ ID NO: 40699 - protein, 10 aa, Artificial Sequence
  Description of Artificial Sequence: Synthetic epitope
RELASTTQID

SEQ ID NO: 40700 - protein, 10 aa, Artificial Sequence
  Description of Artificial Sequence: Synthetic epitope
RELAVAVAVS

SEQ ID NO: 40701 - protein, 10 aa, Artificial Sequence
  Description of Artificial Sequence: Synthetic epitope
RELDSAQFQE

SEQ ID NO: 40702 - protein, 10 aa, Artificial Sequence
  Description of Artificial Sequence: Synthetic epitope
RELEIQVGEK

SEQ ID NO: 40703 - protein, 10 aa, Artificial Sequence
  Description of Artificial Sequence: Synthetic epitope
RELFSLLTQL

SEQ ID NO: 40704 - protein, 10 aa, Artificial Sequence
  Description of Artificial Sequence: Synthetic epitope
RELGETQRRP

SEQ ID NO: 40705 - protein, 10 aa, Artificial Sequence
  Description of Artificial Sequence: Synthetic epitope
RELIAKKTTP

SEQ ID NO: 40706 - protein, 10 aa, Artificial Sequence
  Description of Artificial Sequence: Synthetic epitope
RELIARRTTP

SEQ ID NO: 40707 - protein, 10 aa, Artificial Sequence
  Description of Artificial Sequence: Synthetic epitope
RELIDALTAE

SEQ ID NO: 40708 - protein, 10 aa, Artificial Sequence
  Description of Artificial Sequence: Synthetic epitope
RELIQAKVGS

SEQ ID NO: 40709 - protein, 10 aa, Artificial Sequence
  Description of Artificial Sequence: Synthetic epitope
RELISIFEQI

SEQ ID NO: 40710 - protein, 10 aa, Artificial Sequence
  Description of Artificial Sequence: Synthetic epitope
RELKEISSTS

SEQ ID NO: 40711 - protein, 10 aa, Artificial Sequence
  Description of Artificial Sequence: Synthetic epitope
RELKMRTSQV

SEQ ID NO: 40712 - protein, 10 aa, Artificial Sequence
  Description of Artificial Sequence: Synthetic epitope
RELKVKLLHK

SEQ ID NO: 40713 - protein, 10 aa, Artificial Sequence
  Description of Artificial Sequence: Synthetic epitope
RELLAAKKTH

SEQ ID NO: 40714 - protein, 10 aa, Artificial Sequence
  Description of Artificial Sequence: Synthetic epitope
RELLETTREH

SEQ ID NO: 40715 - protein, 10 aa, Artificial Sequence
  Description of Artificial Sequence: Synthetic epitope
RELLRLAGRK

SEQ ID NO: 40716 - protein, 10 aa, Artificial Sequence
  Description of Artificial Sequence: Synthetic epitope
RELNSKTTLK

SEQ ID NO: 40717 - protein, 10 aa, Artificial Sequence
  Description of Artificial Sequence: Synthetic epitope
RELPIAPSHV

SEQ ID NO: 40718 - protein, 10 aa, Artificial Sequence
  Description of Artificial Sequence: Synthetic epitope
RELQGLATNQ

SEQ ID NO: 40719 - protein, 10 aa, Artificial Sequence
  Description of Artificial Sequence: Synthetic epitope
RELSKSRQTM

SEQ ID NO: 40720 - protein, 10 aa, Artificial Sequence
  Description of Artificial Sequence: Synthetic epitope
RELSVDLRAE

SEQ ID NO: 40721 - protein, 10 aa, Artificial Sequence
  Description of Artificial Sequence: Synthetic epitope
RELTKKLREQ

SEQ ID NO: 40722 - protein, 10 aa, Artificial Sequence
  Description of Artificial Sequence: Synthetic epitope
RELVAVLREP

SEQ ID NO: 40723 - protein, 10 aa, Artificial Sequence
  Description of Artificial Sequence: Synthetic epitope
RELVWQSVDF

SEQ ID NO: 40724 - protein, 10 aa, Artificial Sequence
  Description of Artificial Sequence: Synthetic epitope
RELYTSKWTV

SEQ ID NO: 40725 - protein, 10 aa, Artificial Sequence
  Description of Artificial Sequence: Synthetic epitope
REMAKGSHED

SEQ ID NO: 40726 - protein, 10 aa, Artificial Sequence
  Description of Artificial Sequence: Synthetic epitope
REMEDSNRNS

SEQ ID NO: 40727 - protein, 10 aa, Artificial Sequence
  Description of Artificial Sequence: Synthetic epitope
REMEKSFDEQ

SEQ ID NO: 40728 - protein, 10 aa, Artificial Sequence
  Description of Artificial Sequence: Synthetic epitope
REMISSLGVS

SEQ ID NO: 40729 - protein, 10 aa, Artificial Sequence
  Description of Artificial Sequence: Synthetic epitope
REMKAKAKAA

SEQ ID NO: 40730 - protein, 10 aa, Artificial Sequence
  Description of Artificial Sequence: Synthetic epitope
REMLLAKLNE

SEQ ID NO: 40731 - protein, 10 aa, Artificial Sequence
  Description of Artificial Sequence: Synthetic epitope
REMQESVQVN

SEQ ID NO: 40732 - protein, 10 aa, Artificial Sequence
  Description of Artificial Sequence: Synthetic epitope
REMSQEESTR

SEQ ID NO: 40733 - protein, 10 aa, Artificial Sequence
  Description of Artificial Sequence: Synthetic epitope
REMSRSVDVT

SEQ ID NO: 40734 - protein, 10 aa, Artificial Sequence
  Description of Artificial Sequence: Synthetic epitope
REMVVNLQKQ

SEQ ID NO: 40735 - protein, 10 aa, Artificial Sequence
  Description of Artificial Sequence: Synthetic epitope
REMYERENRN

SEQ ID NO: 40736 - protein, 10 aa, Artificial Sequence
  Description of Artificial Sequence: Synthetic epitope
RENITQSTDI

SEQ ID NO: 40737 - protein, 10 aa, Artificial Sequence
  Description of Artificial Sequence: Synthetic epitope
RENKRVTSAT

SEQ ID NO: 40738 - protein, 10 aa, Artificial Sequence
  Description of Artificial Sequence: Synthetic epitope
RENLATVEGN

SEQ ID NO: 40739 - protein, 10 aa, Artificial Sequence
  Description of Artificial Sequence: Synthetic epitope
RENLNAQMSS

SEQ ID NO: 40740 - protein, 10 aa, Artificial Sequence
  Description of Artificial Sequence: Synthetic epitope
RENMGSNEGS

SEQ ID NO: 40741 - protein, 10 aa, Artificial Sequence
  Description of Artificial Sequence: Synthetic epitope
RENPRLIASS

SEQ ID NO: 40742 - protein, 10 aa, Artificial Sequence
  Description of Artificial Sequence: Synthetic epitope
RENQLKMLPK

SEQ ID NO: 40743 - protein, 10 aa, Artificial Sequence
  Description of Artificial Sequence: Synthetic epitope
RENRTDTASR

SEQ ID NO: 40744 - protein, 10 aa, Artificial Sequence
  Description of Artificial Sequence: Synthetic epitope
RENSDSDEAH

SEQ ID NO: 40745 - protein, 10 aa, Artificial Sequence
  Description of Artificial Sequence: Synthetic epitope
RENSTTEIAH

SEQ ID NO: 40746 - protein, 10 aa, Artificial Sequence
  Description of Artificial Sequence: Synthetic epitope
REPFQNTEEP

SEQ ID NO: 40747 - protein, 10 aa, Artificial Sequence
  Description of Artificial Sequence: Synthetic epitope
REPGLVLLPP

SEQ ID NO: 40748 - protein, 10 aa, Artificial Sequence
  Description of Artificial Sequence: Synthetic epitope
REPIAQDQPK

SEQ ID NO: 40749 - protein, 10 aa, Artificial Sequence
  Description of Artificial Sequence: Synthetic epitope
REPLATSQAQ

SEQ ID NO: 40750 - protein, 10 aa, Artificial Sequence
  Description of Artificial Sequence: Synthetic epitope
REPLVYDLAS

SEQ ID NO: 40751 - protein, 10 aa, Artificial Sequence
  Description of Artificial Sequence: Synthetic epitope
REPMLMVEGM

SEQ ID NO: 40752 - protein, 10 aa, Artificial Sequence
  Description of Artificial Sequence: Synthetic epitope
REPSTSQVQK

SEQ ID NO: 40753 - protein, 10 aa, Artificial Sequence
  Description of Artificial Sequence: Synthetic epitope
REQAALVSKA

SEQ ID NO: 40754 - protein, 10 aa, Artificial Sequence
  Description of Artificial Sequence: Synthetic epitope
REQALLNARS

SEQ ID NO: 40755 - protein, 10 aa, Artificial Sequence
  Description of Artificial Sequence: Synthetic epitope
REQALRIQTL

SEQ ID NO: 40756 - protein, 10 aa, Artificial Sequence
  Description of Artificial Sequence: Synthetic epitope
REQESARLQQ

SEQ ID NO: 40757 - protein, 10 aa, Artificial Sequence
  Description of Artificial Sequence: Synthetic epitope
REQILMKRFE

SEQ ID NO: 40758 - protein, 10 aa, Artificial Sequence
  Description of Artificial Sequence: Synthetic epitope
REQIMVLNNK

SEQ ID NO: 40759 - protein, 10 aa, Artificial Sequence
  Description of Artificial Sequence: Synthetic epitope
REQIREATSE

SEQ ID NO: 40760 - protein, 10 aa, Artificial Sequence
  Description of Artificial Sequence: Synthetic epitope
REQLGSAEAA

SEQ ID NO: 40761 - protein, 10 aa, Artificial Sequence
  Description of Artificial Sequence: Synthetic epitope
REQMAGALRK

SEQ ID NO: 40762 - protein, 10 aa, Artificial Sequence
  Description of Artificial Sequence: Synthetic epitope
REQNERNRDS

SEQ ID NO: 40763 - protein, 10 aa, Artificial Sequence
  Description of Artificial Sequence: Synthetic epitope
REQRKSSAKE

SEQ ID NO: 40764 - protein, 10 aa, Artificial Sequence
  Description of Artificial Sequence: Synthetic epitope
REQSEQLEQD

SEQ ID NO: 40765 - protein, 10 aa, Artificial Sequence
  Description of Artificial Sequence: Synthetic epitope
REQSLDALQT

SEQ ID NO: 40766 - protein, 10 aa, Artificial Sequence
  Description of Artificial Sequence: Synthetic epitope
REQSSEAAET

SEQ ID NO: 40767 - protein, 10 aa, Artificial Sequence
  Description of Artificial Sequence: Synthetic epitope
REQTMSEKEE

SEQ ID NO: 40768 - protein, 10 aa, Artificial Sequence
  Description of Artificial Sequence: Synthetic epitope
REQTSHQIIQ

SEQ ID NO: 40769 - protein, 10 aa, Artificial Sequence
  Description of Artificial Sequence: Synthetic epitope
RERALQIGAQ

SEQ ID NO: 40770 - protein, 10 aa, Artificial Sequence
  Description of Artificial Sequence: Synthetic epitope
RERAQALQEQ

SEQ ID NO: 40771 - protein, 10 aa, Artificial Sequence
  Description of Artificial Sequence: Synthetic epitope
RERAYGSSGE

SEQ ID NO: 40772 - protein, 10 aa, Artificial Sequence
  Description of Artificial Sequence: Synthetic epitope
RERDEKMQHV

SEQ ID NO: 40773 - protein, 10 aa, Artificial Sequence
  Description of Artificial Sequence: Synthetic epitope
RERDSSREAS

SEQ ID NO: 40774 - protein, 10 aa, Artificial Sequence
  Description of Artificial Sequence: Synthetic epitope
REREKKDEKD

SEQ ID NO: 40775 - protein, 10 aa, Artificial Sequence
  Description of Artificial Sequence: Synthetic epitope
RERENESQES

SEQ ID NO: 40776 - protein, 10 aa, Artificial Sequence
  Description of Artificial Sequence: Synthetic epitope
RERENSESKE

SEQ ID NO: 40777 - protein, 10 aa, Artificial Sequence
  Description of Artificial Sequence: Synthetic epitope
REREPADQAL

SEQ ID NO: 40778 - protein, 10 aa, Artificial Sequence
  Description of Artificial Sequence: Synthetic epitope
RERKIGRAGY

SEQ ID NO: 40779 - protein, 10 aa, Artificial Sequence
  Description of Artificial Sequence: Synthetic epitope
RERKQFEAED

SEQ ID NO: 40780 - protein, 10 aa, Artificial Sequence
  Description of Artificial Sequence: Synthetic epitope
RERLSTLPDK

SEQ ID NO: 40781 - protein, 10 aa, Artificial Sequence
  Description of Artificial Sequence: Synthetic epitope
RERNAERMES

SEQ ID NO: 40782 - protein, 10 aa, Artificial Sequence
  Description of Artificial Sequence: Synthetic epitope
RERNSRSGKT

SEQ ID NO: 40783 - protein, 10 aa, Artificial Sequence
  Description of Artificial Sequence: Synthetic epitope
RERQEATLAG

SEQ ID NO: 40784 - protein, 10 aa, Artificial Sequence
  Description of Artificial Sequence: Synthetic epitope
RERQEYRVQQ

SEQ ID NO: 40785 - protein, 10 aa, Artificial Sequence
  Description of Artificial Sequence: Synthetic epitope
RERQGIEMEK

SEQ ID NO: 40786 - protein, 10 aa, Artificial Sequence
  Description of Artificial Sequence: Synthetic epitope
RERSLKKRQS

SEQ ID NO: 40787 - protein, 10 aa, Artificial Sequence
  Description of Artificial Sequence: Synthetic epitope
RERSQMLLSR

SEQ ID NO: 40788 - protein, 10 aa, Artificial Sequence
  Description of Artificial Sequence: Synthetic epitope
RERTSLRERQ

SEQ ID NO: 40789 - protein, 10 aa, Artificial Sequence
  Description of Artificial Sequence: Synthetic epitope
RERVANREEN

SEQ ID NO: 40790 - protein, 10 aa, Artificial Sequence
  Description of Artificial Sequence: Synthetic epitope
RERVPATKTV

SEQ ID NO: 40791 - protein, 10 aa, Artificial Sequence
  Description of Artificial Sequence: Synthetic epitope
RERYEDSQQE

SEQ ID NO: 40792 - protein, 10 aa, Artificial Sequence
  Description of Artificial Sequence: Synthetic epitope
RESAKSELTE

SEQ ID NO: 40793 - protein, 10 aa, Artificial Sequence
  Description of Artificial Sequence: Synthetic epitope
RESANGFETN

SEQ ID NO: 40794 - protein, 10 aa, Artificial Sequence
  Description of Artificial Sequence: Synthetic epitope
RESAVNLVRS

SEQ ID NO: 40795 - protein, 10 aa, Artificial Sequence
  Description of Artificial Sequence: Synthetic epitope
RESEKSLENE

SEQ ID NO: 40796 - protein, 10 aa, Artificial Sequence
  Description of Artificial Sequence: Synthetic epitope
RESENSAQKL

SEQ ID NO: 40797 - protein, 10 aa, Artificial Sequence
  Description of Artificial Sequence: Synthetic epitope
RESIKAQGAT

SEQ ID NO: 40798 - protein, 10 aa, Artificial Sequence
  Description of Artificial Sequence: Synthetic epitope
RESKKTESSK

SEQ ID NO: 40799 - protein, 10 aa, Artificial Sequence
  Description of Artificial Sequence: Synthetic epitope
RESKSNAEES

SEQ ID NO: 40800 - protein, 10 aa, Artificial Sequence
  Description of Artificial Sequence: Synthetic epitope
RESKSRLVQQ

SEQ ID NO: 40801 - protein, 10 aa, Artificial Sequence
  Description of Artificial Sequence: Synthetic epitope
RESKTRVKNR

SEQ ID NO: 40802 - protein, 10 aa, Artificial Sequence
  Description of Artificial Sequence: Synthetic epitope
RESLAQTTEQ

SEQ ID NO: 40803 - protein, 10 aa, Artificial Sequence
  Description of Artificial Sequence: Synthetic epitope
RESLLSSASL

SEQ ID NO: 40804 - protein, 10 aa, Artificial Sequence
  Description of Artificial Sequence: Synthetic epitope
RESLTKKAKR

SEQ ID NO: 40805 - protein, 10 aa, Artificial Sequence
  Description of Artificial Sequence: Synthetic epitope
RESMAEITDI

SEQ ID NO: 40806 - protein, 10 aa, Artificial Sequence
  Description of Artificial Sequence: Synthetic epitope
RESMDLNLKE

SEQ ID NO: 40807 - protein, 10 aa, Artificial Sequence
  Description of Artificial Sequence: Synthetic epitope
RESPLKIQKD

SEQ ID NO: 40808 - protein, 10 aa, Artificial Sequence
  Description of Artificial Sequence: Synthetic epitope
RESQDAAGAH

SEQ ID NO: 40809 - protein, 10 aa, Artificial Sequence
  Description of Artificial Sequence: Synthetic epitope
RESQNSLDES

SEQ ID NO: 40810 - protein, 10 aa, Artificial Sequence
  Description of Artificial Sequence: Synthetic epitope
RESQSVENLV

SEQ ID NO: 40811 - protein, 10 aa, Artificial Sequence
  Description of Artificial Sequence: Synthetic epitope
RESQVELREQ

SEQ ID NO: 40812 - protein, 10 aa, Artificial Sequence
  Description of Artificial Sequence: Synthetic epitope
RESQVVSENG

SEQ ID NO: 40813 - protein, 10 aa, Artificial Sequence
  Description of Artificial Sequence: Synthetic epitope
RESSALPLLF

SEQ ID NO: 40814 - protein, 10 aa, Artificial Sequence
  Description of Artificial Sequence: Synthetic epitope
RESSATSSQR

SEQ ID NO: 40815 - protein, 10 aa, Artificial Sequence
  Description of Artificial Sequence: Synthetic epitope
RESSELELGS

SEQ ID NO: 40816 - protein, 10 aa, Artificial Sequence
  Description of Artificial Sequence: Synthetic epitope
RESSKSAREK

SEQ ID NO: 40817 - protein, 10 aa, Artificial Sequence
  Description of Artificial Sequence: Synthetic epitope
RESSLLNQHA

SEQ ID NO: 40818 - protein, 10 aa, Artificial Sequence
  Description of Artificial Sequence: Synthetic epitope
RESSNISSVA

SEQ ID NO: 40819 - protein, 10 aa, Artificial Sequence
  Description of Artificial Sequence: Synthetic epitope
RESTAFSRSL

SEQ ID NO: 40820 - protein, 10 aa, Artificial Sequence
  Description of Artificial Sequence: Synthetic epitope
RESTENVPRT

SEQ ID NO: 40821 - protein, 10 aa, Artificial Sequence
  Description of Artificial Sequence: Synthetic epitope
RESTFTIASS

SEQ ID NO: 40822 - protein, 10 aa, Artificial Sequence
  Description of Artificial Sequence: Synthetic epitope
RESTGSYSDL

SEQ ID NO: 40823 - protein, 10 aa, Artificial Sequence
  Description of Artificial Sequence: Synthetic epitope
RESVTIEAQE

SEQ ID NO: 40824 - protein, 10 aa, Artificial Sequence
  Description of Artificial Sequence: Synthetic epitope
RETAMEGEWP

SEQ ID NO: 40825 - protein, 10 aa, Artificial Sequence
  Description of Artificial Sequence: Synthetic epitope
RETDASLSRR

SEQ ID NO: 40826 - protein, 10 aa, Artificial Sequence
  Description of Artificial Sequence: Synthetic epitope
RETDDKTSPF

SEQ ID NO: 40827 - protein, 10 aa, Artificial Sequence
  Description of Artificial Sequence: Synthetic epitope
RETEEIVSAS

SEQ ID NO: 40828 - protein, 10 aa, Artificial Sequence
  Description of Artificial Sequence: Synthetic epitope
RETEFAVLEE

SEQ ID NO: 40829 - protein, 10 aa, Artificial Sequence
  Description of Artificial Sequence: Synthetic epitope
RETEKSRWSE

SEQ ID NO: 40830 - protein, 10 aa, Artificial Sequence
  Description of Artificial Sequence: Synthetic epitope
RETETESSRL

SEQ ID NO: 40831 - protein, 10 aa, Artificial Sequence
  Description of Artificial Sequence: Synthetic epitope
RETIASVRSL

SEQ ID NO: 40832 - protein, 10 aa, Artificial Sequence
  Description of Artificial Sequence: Synthetic epitope
RETKEDQIAE

SEQ ID NO: 40833 - protein, 10 aa, Artificial Sequence
  Description of Artificial Sequence: Synthetic epitope
RETLAKIQES

SEQ ID NO: 40834 - protein, 10 aa, Artificial Sequence
  Description of Artificial Sequence: Synthetic epitope
RETLDAQTFH

SEQ ID NO: 40835 - protein, 10 aa, Artificial Sequence
  Description of Artificial Sequence: Synthetic epitope
RETLGLKTSS

SEQ ID NO: 40836 - protein, 10 aa, Artificial Sequence
  Description of Artificial Sequence: Synthetic epitope
RETLKMSNAE

SEQ ID NO: 40837 - protein, 10 aa, Artificial Sequence
  Description of Artificial Sequence: Synthetic epitope
RETMKESESS

SEQ ID NO: 40838 - protein, 10 aa, Artificial Sequence
  Description of Artificial Sequence: Synthetic epitope
RETQARQEKP

SEQ ID NO: 40839 - protein, 10 aa, Artificial Sequence
  Description of Artificial Sequence: Synthetic epitope
RETSKQKQKG

SEQ ID NO: 40840 - protein, 10 aa, Artificial Sequence
  Description of Artificial Sequence: Synthetic epitope
RETSVSKTHR

SEQ ID NO: 40841 - protein, 10 aa, Artificial Sequence
  Description of Artificial Sequence: Synthetic epitope
RETVKAYRKN

SEQ ID NO: 40842 - protein, 10 aa, Artificial Sequence
  Description of Artificial Sequence: Synthetic epitope
RETVQIINKE

SEQ ID NO: 40843 - protein, 10 aa, Artificial Sequence
  Description of Artificial Sequence: Synthetic epitope
RETVSQLQAL

SEQ ID NO: 40844 - protein, 10 aa, Artificial Sequence
  Description of Artificial Sequence: Synthetic epitope
REVASNQLQS

SEQ ID NO: 40845 - protein, 10 aa, Artificial Sequence
  Description of Artificial Sequence: Synthetic epitope
REVDSSAAQR

SEQ ID NO: 40846 - protein, 10 aa, Artificial Sequence
  Description of Artificial Sequence: Synthetic epitope
REVEIVSQEE

SEQ ID NO: 40847 - protein, 10 aa, Artificial Sequence
  Description of Artificial Sequence: Synthetic epitope
REVESVDLPH

SEQ ID NO: 40848 - protein, 10 aa, Artificial Sequence
  Description of Artificial Sequence: Synthetic epitope
REVKSLLEEL

SEQ ID NO: 40849 - protein, 10 aa, Artificial Sequence
  Description of Artificial Sequence: Synthetic epitope
REVKVAPSEL

SEQ ID NO: 40850 - protein, 10 aa, Artificial Sequence
  Description of Artificial Sequence: Synthetic epitope
REVLSALSQL

SEQ ID NO: 40851 - protein, 10 aa, Artificial Sequence
  Description of Artificial Sequence: Synthetic epitope
REVNLLNKEI

SEQ ID NO: 40852 - protein, 10 aa, Artificial Sequence
  Description of Artificial Sequence: Synthetic epitope
REVQMSKDKE

SEQ ID NO: 40853 - protein, 10 aa, Artificial Sequence
  Description of Artificial Sequence: Synthetic epitope
REVSAAREEV

SEQ ID NO: 40854 - protein, 10 aa, Artificial Sequence
  Description of Artificial Sequence: Synthetic epitope
REVSAAREEV

SEQ ID NO: 40855 - protein, 10 aa, Artificial Sequence
  Description of Artificial Sequence: Synthetic epitope
REVSEISIVD

SEQ ID NO: 40856 - protein, 10 aa, Artificial Sequence
  Description of Artificial Sequence: Synthetic epitope
REVSITNSLS

SEQ ID NO: 40857 - protein, 10 aa, Artificial Sequence
  Description of Artificial Sequence: Synthetic epitope
REVSKLVSMN

SEQ ID NO: 40858 - protein, 10 aa, Artificial Sequence
  Description of Artificial Sequence: Synthetic epitope
REVSSFLSKK

SEQ ID NO: 40859 - protein, 10 aa, Artificial Sequence
  Description of Artificial Sequence: Synthetic epitope
REVSSHAQRI

SEQ ID NO: 40860 - protein, 10 aa, Artificial Sequence
  Description of Artificial Sequence: Synthetic epitope
REVVARRSDL

SEQ ID NO: 40861 - protein, 10 aa, Artificial Sequence
  Description of Artificial Sequence: Synthetic epitope
REVVSQNHGD

SEQ ID NO: 40862 - protein, 10 aa, Artificial Sequence
  Description of Artificial Sequence: Synthetic epitope
REVVSSLQKK

SEQ ID NO: 40863 - protein, 10 aa, Artificial Sequence
  Description of Artificial Sequence: Synthetic epitope
REWLVAVKSL

SEQ ID NO: 40864 - protein, 10 aa, Artificial Sequence
  Description of Artificial Sequence: Synthetic epitope
REWSLESSPA

SEQ ID NO: 40865 - protein, 10 aa, Artificial Sequence
  Description of Artificial Sequence: Synthetic epitope
REWVESMGGT

SEQ ID NO: 40866 - protein, 10 aa, Artificial Sequence
  Description of Artificial Sequence: Synthetic epitope
REYEAELETQ

SEQ ID NO: 40867 - protein, 10 aa, Artificial Sequence
  Description of Artificial Sequence: Synthetic epitope
REYEDNDEVH

SEQ ID NO: 40868 - protein, 10 aa, Artificial Sequence
  Description of Artificial Sequence: Synthetic epitope
REYEDPPSEE

SEQ ID NO: 40869 - protein, 10 aa, Artificial Sequence
  Description of Artificial Sequence: Synthetic epitope
REYERMKTEA

SEQ ID NO: 40870 - protein, 10 aa, Artificial Sequence
  Description of Artificial Sequence: Synthetic epitope
REYGTIDDVD

SEQ ID NO: 40871 - protein, 10 aa, Artificial Sequence
  Description of Artificial Sequence: Synthetic epitope
REYLARALRP

SEQ ID NO: 40872 - protein, 10 aa, Artificial Sequence
  Description of Artificial Sequence: Synthetic epitope
REYQALVQRA

SEQ ID NO: 40873 - protein, 10 aa, Artificial Sequence
  Description of Artificial Sequence: Synthetic epitope
REYSSVFSHG

SEQ ID NO: 40874 - protein, 10 aa, Artificial Sequence
  Description of Artificial Sequence: Synthetic epitope
RFARRSVSDN

SEQ ID NO: 40875 - protein, 10 aa, Artificial Sequence
  Description of Artificial Sequence: Synthetic epitope
RFDASVDQAS

SEQ ID NO: 40876 - protein, 10 aa, Artificial Sequence
  Description of Artificial Sequence: Synthetic epitope
RFDQKSLSPI

SEQ ID NO: 40877 - protein, 10 aa, Artificial Sequence
  Description of Artificial Sequence: Synthetic epitope
RFEAEHISNY

SEQ ID NO: 40878 - protein, 10 aa, Artificial Sequence
  Description of Artificial Sequence: Synthetic epitope
RFELNVNESA

SEQ ID NO: 40879 - protein, 10 aa, Artificial Sequence
  Description of Artificial Sequence: Synthetic epitope
RFENLAAEEA

SEQ ID NO: 40880 - protein, 10 aa, Artificial Sequence
  Description of Artificial Sequence: Synthetic epitope
RFFIRYYVDV

SEQ ID NO: 40881 - protein, 10 aa, Artificial Sequence
  Description of Artificial Sequence: Synthetic epitope
RFFKKTNLSS

SEQ ID NO: 40882 - protein, 10 aa, Artificial Sequence
  Description of Artificial Sequence: Synthetic epitope
RFFLSSARQA

SEQ ID NO: 40883 - protein, 10 aa, Artificial Sequence
  Description of Artificial Sequence: Synthetic epitope
RFFWLKVSER

SEQ ID NO: 40884 - protein, 10 aa, Artificial Sequence
  Description of Artificial Sequence: Synthetic epitope
RFGIRSNSSP

SEQ ID NO: 40885 - protein, 10 aa, Artificial Sequence
  Description of Artificial Sequence: Synthetic epitope
RFGIVTSSAG

SEQ ID NO: 40886 - protein, 10 aa, Artificial Sequence
  Description of Artificial Sequence: Synthetic epitope
RFGNQSMKRE

SEQ ID NO: 40887 - protein, 10 aa, Artificial Sequence
  Description of Artificial Sequence: Synthetic epitope
RFGSSRSSEP

SEQ ID NO: 40888 - protein, 10 aa, Artificial Sequence
  Description of Artificial Sequence: Synthetic epitope
RFILTISQQF

SEQ ID NO: 40889 - protein, 10 aa, Artificial Sequence
  Description of Artificial Sequence: Synthetic epitope
RFISQELPSQ

SEQ ID NO: 40890 - protein, 10 aa, Artificial Sequence
  Description of Artificial Sequence: Synthetic epitope
RFISVLKAHQ

SEQ ID NO: 40891 - protein, 10 aa, Artificial Sequence
  Description of Artificial Sequence: Synthetic epitope
RFITHISKME

SEQ ID NO: 40892 - protein, 10 aa, Artificial Sequence
  Description of Artificial Sequence: Synthetic epitope
RFIVIADFRK

SEQ ID NO: 40893 - protein, 10 aa, Artificial Sequence
  Description of Artificial Sequence: Synthetic epitope
RFLIKSNIVK

SEQ ID NO: 40894 - protein, 10 aa, Artificial Sequence
  Description of Artificial Sequence: Synthetic epitope
RFLKKRISSD

SEQ ID NO: 40895 - protein, 10 aa, Artificial Sequence
  Description of Artificial Sequence: Synthetic epitope
RFLKSILKKE

SEQ ID NO: 40896 - protein, 10 aa, Artificial Sequence
  Description of Artificial Sequence: Synthetic epitope
RFLNKQAPQT

SEQ ID NO: 40897 - protein, 10 aa, Artificial Sequence
  Description of Artificial Sequence: Synthetic epitope
RFLRSVARVF

SEQ ID NO: 40898 - protein, 10 aa, Artificial Sequence
  Description of Artificial Sequence: Synthetic epitope
RFLSRKKIRH

SEQ ID NO: 40899 - protein, 10 aa, Artificial Sequence
  Description of Artificial Sequence: Synthetic epitope
RFLYIVNLDA

SEQ ID NO: 40900 - protein, 10 aa, Artificial Sequence
  Description of Artificial Sequence: Synthetic epitope
RFMQAVTGWK

SEQ ID NO: 40901 - protein, 10 aa, Artificial Sequence
  Description of Artificial Sequence: Synthetic epitope
RFMTDSTGEI

SEQ ID NO: 40902 - protein, 10 aa, Artificial Sequence
  Description of Artificial Sequence: Synthetic epitope
RFMTTAMYDA

SEQ ID NO: 40903 - protein, 10 aa, Artificial Sequence
  Description of Artificial Sequence: Synthetic epitope
RFNKNYKGMS

SEQ ID NO: 40904 - protein, 10 aa, Artificial Sequence
  Description of Artificial Sequence: Synthetic epitope
RFNTVSESGT

SEQ ID NO: 40905 - protein, 10 aa, Artificial Sequence
  Description of Artificial Sequence: Synthetic epitope
RFPSKLSSDL

SEQ ID NO: 40906 - protein, 10 aa, Artificial Sequence
  Description of Artificial Sequence: Synthetic epitope
RFPSTAIKIQ

SEQ ID NO: 40907 - protein, 10 aa, Artificial Sequence
  Description of Artificial Sequence: Synthetic epitope
RFQDAVLANS

SEQ ID NO: 40908 - protein, 10 aa, Artificial Sequence
  Description of Artificial Sequence: Synthetic epitope
RFQHSQDVSD

SEQ ID NO: 40909 - protein, 10 aa, Artificial Sequence
  Description of Artificial Sequence: Synthetic epitope
RFQINYTEYD

SEQ ID NO: 40910 - protein, 10 aa, Artificial Sequence
  Description of Artificial Sequence: Synthetic epitope
RFQRKFKAKQ

SEQ ID NO: 40911 - protein, 10 aa, Artificial Sequence
  Description of Artificial Sequence: Synthetic epitope
RFQTVQPMAL

SEQ ID NO: 40912 - protein, 10 aa, Artificial Sequence
  Description of Artificial Sequence: Synthetic epitope
RFQVHYVTST

SEQ ID NO: 40913 - protein, 10 aa, Artificial Sequence
  Description of Artificial Sequence: Synthetic epitope
RFRAESVVPA

SEQ ID NO: 40914 - protein, 10 aa, Artificial Sequence
  Description of Artificial Sequence: Synthetic epitope
RFRARAQLVS

SEQ ID NO: 40915 - protein, 10 aa, Artificial Sequence
  Description of Artificial Sequence: Synthetic epitope
RFRTLVAHYP

SEQ ID NO: 40916 - protein, 10 aa, Artificial Sequence
  Description of Artificial Sequence: Synthetic epitope
RFSALLEPSR

SEQ ID NO: 40917 - protein, 10 aa, Artificial Sequence
  Description of Artificial Sequence: Synthetic epitope
RFSDAYKKSQ

SEQ ID NO: 40918 - protein, 10 aa, Artificial Sequence
  Description of Artificial Sequence: Synthetic epitope
RFSDLTKSLQ

SEQ ID NO: 40919 - protein, 10 aa, Artificial Sequence
  Description of Artificial Sequence: Synthetic epitope
RFSSELEQIE

SEQ ID NO: 40920 - protein, 10 aa, Artificial Sequence
  Description of Artificial Sequence: Synthetic epitope
RFTERRAQEA

SEQ ID NO: 40921 - protein, 10 aa, Artificial Sequence
  Description of Artificial Sequence: Synthetic epitope
RFTHNIRVIE

SEQ ID NO: 40922 - protein, 10 aa, Artificial Sequence
  Description of Artificial Sequence: Synthetic epitope
RFTKRVRIIE

SEQ ID NO: 40923 - protein, 10 aa, Artificial Sequence
  Description of Artificial Sequence: Synthetic epitope
RFTNQTQGRD

SEQ ID NO: 40924 - protein, 10 aa, Artificial Sequence
  Description of Artificial Sequence: Synthetic epitope
RFTRSSFLSG

SEQ ID NO: 40925 - protein, 10 aa, Artificial Sequence
  Description of Artificial Sequence: Synthetic epitope
RFTSKVSATD

SEQ ID NO: 40926 - protein, 10 aa, Artificial Sequence
  Description of Artificial Sequence: Synthetic epitope
RFTSSLVSDS

SEQ ID NO: 40927 - protein, 10 aa, Artificial Sequence
  Description of Artificial Sequence: Synthetic epitope
RFTYRSDSFE

SEQ ID NO: 40928 - protein, 10 aa, Artificial Sequence
  Description of Artificial Sequence: Synthetic epitope
RFVEKSLSQE

SEQ ID NO: 40929 - protein, 10 aa, Artificial Sequence
  Description of Artificial Sequence: Synthetic epitope
RFVKKFVKTQ

SEQ ID NO: 40930 - protein, 10 aa, Artificial Sequence
  Description of Artificial Sequence: Synthetic epitope
RFVLSQAKDE

SEQ ID NO: 40931 - protein, 10 aa, Artificial Sequence
  Description of Artificial Sequence: Synthetic epitope
RFVVLEMIND

SEQ ID NO: 40932 - protein, 10 aa, Artificial Sequence
  Description of Artificial Sequence: Synthetic epitope
RFWYFVSQLK

SEQ ID NO: 40933 - protein, 10 aa, Artificial Sequence
  Description of Artificial Sequence: Synthetic epitope
RGADAAQAKV

SEQ ID NO: 40934 - protein, 10 aa, Artificial Sequence
  Description of Artificial Sequence: Synthetic epitope
RGAERQKLMR

SEQ ID NO: 40935 - protein, 10 aa, Artificial Sequence
  Description of Artificial Sequence: Synthetic epitope
RGAETGQGAS

SEQ ID NO: 40936 - protein, 10 aa, Artificial Sequence
  Description of Artificial Sequence: Synthetic epitope
RGALKESGLS

SEQ ID NO: 40937 - protein, 10 aa, Artificial Sequence
  Description of Artificial Sequence: Synthetic epitope
RGALLKVNQE

SEQ ID NO: 40938 - protein, 10 aa, Artificial Sequence
  Description of Artificial Sequence: Synthetic epitope
RGAMEFATEE

SEQ ID NO: 40939 - protein, 10 aa, Artificial Sequence
  Description of Artificial Sequence: Synthetic epitope
RGATGFTTRS

SEQ ID NO: 40940 - protein, 10 aa, Artificial Sequence
  Description of Artificial Sequence: Synthetic epitope
RGATTLIYTH

SEQ ID NO: 40941 - protein, 10 aa, Artificial Sequence
  Description of Artificial Sequence: Synthetic epitope
RGAVFVDKEN

SEQ ID NO: 40942 - protein, 10 aa, Artificial Sequence
  Description of Artificial Sequence: Synthetic epitope
RGAVRAAFQL

SEQ ID NO: 40943 - protein, 10 aa, Artificial Sequence
  Description of Artificial Sequence: Synthetic epitope
RGDIMAIAPW

SEQ ID NO: 40944 - protein, 10 aa, Artificial Sequence
  Description of Artificial Sequence: Synthetic epitope
RGDLVSVKKS

SEQ ID NO: 40945 - protein, 10 aa, Artificial Sequence
  Description of Artificial Sequence: Synthetic epitope
RGDSIKQEEA

SEQ ID NO: 40946 - protein, 10 aa, Artificial Sequence
  Description of Artificial Sequence: Synthetic epitope
RGDVDEFKKL

SEQ ID NO: 40947 - protein, 10 aa, Artificial Sequence
  Description of Artificial Sequence: Synthetic epitope
RGDVDMSEVE

SEQ ID NO: 40948 - protein, 10 aa, Artificial Sequence
  Description of Artificial Sequence: Synthetic epitope
RGEAGSSARS

SEQ ID NO: 40949 - protein, 10 aa, Artificial Sequence
  Description of Artificial Sequence: Synthetic epitope
RGEAVDEGEI

SEQ ID NO: 40950 - protein, 10 aa, Artificial Sequence
  Description of Artificial Sequence: Synthetic epitope
RGEGKVATTV

SEQ ID NO: 40951 - protein, 10 aa, Artificial Sequence
  Description of Artificial Sequence: Synthetic epitope
RGELKTELLG

SEQ ID NO: 40952 - protein, 10 aa, Artificial Sequence
  Description of Artificial Sequence: Synthetic epitope
RGELQLIKIF

SEQ ID NO: 40953 - protein, 10 aa, Artificial Sequence
  Description of Artificial Sequence: Synthetic epitope
RGELSVIKNE

SEQ ID NO: 40954 - protein, 10 aa, Artificial Sequence
  Description of Artificial Sequence: Synthetic epitope
RGERDSQTQA

SEQ ID NO: 40955 - protein, 10 aa, Artificial Sequence
  Description of Artificial Sequence: Synthetic epitope
RGERSEKYND

SEQ ID NO: 40956 - protein, 10 aa, Artificial Sequence
  Description of Artificial Sequence: Synthetic epitope
RGETFPPFIV

SEQ ID NO: 40957 - protein, 10 aa, Artificial Sequence
  Description of Artificial Sequence: Synthetic epitope
RGFFTIRKRE

SEQ ID NO: 40958 - protein, 10 aa, Artificial Sequence
  Description of Artificial Sequence: Synthetic epitope
RGGAANSWSE

SEQ ID NO: 40959 - protein, 10 aa, Artificial Sequence
  Description of Artificial Sequence: Synthetic epitope
RGGTLSSKRN

SEQ ID NO: 40960 - protein, 10 aa, Artificial Sequence
  Description of Artificial Sequence: Synthetic epitope
RGGVAAGAEG

SEQ ID NO: 40961 - protein, 10 aa, Artificial Sequence
  Description of Artificial Sequence: Synthetic epitope
RGHEVRKLQN

SEQ ID NO: 40962 - protein, 10 aa, Artificial Sequence
  Description of Artificial Sequence: Synthetic epitope
RGHKNDATET

SEQ ID NO: 40963 - protein, 10 aa, Artificial Sequence
  Description of Artificial Sequence: Synthetic epitope
RGHQHQAWGS

SEQ ID NO: 40964 - protein, 10 aa, Artificial Sequence
  Description of Artificial Sequence: Synthetic epitope
RGIEATRNVT

SEQ ID NO: 40965 - protein, 10 aa, Artificial Sequence
  Description of Artificial Sequence: Synthetic epitope
RGIKRVEGRS

SEQ ID NO: 40966 - protein, 10 aa, Artificial Sequence
  Description of Artificial Sequence: Synthetic epitope
RGIQVSNNGP

SEQ ID NO: 40967 - protein, 10 aa, Artificial Sequence
  Description of Artificial Sequence: Synthetic epitope
RGISSQPFPE

SEQ ID NO: 40968 - protein, 10 aa, Artificial Sequence
  Description of Artificial Sequence: Synthetic epitope
RGIYSKKQHK

SEQ ID NO: 40969 - protein, 10 aa, Artificial Sequence
  Description of Artificial Sequence: Synthetic epitope
RGKAIRSSPE

SEQ ID NO: 40970 - protein, 10 aa, Artificial Sequence
  Description of Artificial Sequence: Synthetic epitope
RGKALRTQLD

SEQ ID NO: 40971 - protein, 10 aa, Artificial Sequence
  Description of Artificial Sequence: Synthetic epitope
RGKDAASSTK

SEQ ID NO: 40972 - protein, 10 aa, Artificial Sequence
  Description of Artificial Sequence: Synthetic epitope
RGKDATLQKQ

SEQ ID NO: 40973 - protein, 10 aa, Artificial Sequence
  Description of Artificial Sequence: Synthetic epitope
RGKEESSEKF

SEQ ID NO: 40974 - protein, 10 aa, Artificial Sequence
  Description of Artificial Sequence: Synthetic epitope
RGKLSMQNRV

SEQ ID NO: 40975 - protein, 10 aa, Artificial Sequence
  Description of Artificial Sequence: Synthetic epitope
RGKMRSASSL

SEQ ID NO: 40976 - protein, 10 aa, Artificial Sequence
  Description of Artificial Sequence: Synthetic epitope
RGKTKMQKKL

SEQ ID NO: 40977 - protein, 10 aa, Artificial Sequence
  Description of Artificial Sequence: Synthetic epitope
RGKVAEPAEY

SEQ ID NO: 40978 - protein, 10 aa, Artificial Sequence
  Description of Artificial Sequence: Synthetic epitope
RGKVKGTQEM

SEQ ID NO: 40979 - protein, 10 aa, Artificial Sequence
  Description of Artificial Sequence: Synthetic epitope
RGLASLVKVS

SEQ ID NO: 40980 - protein, 10 aa, Artificial Sequence
  Description of Artificial Sequence: Synthetic epitope
RGLDALSKKA

SEQ ID NO: 40981 - protein, 10 aa, Artificial Sequence
  Description of Artificial Sequence: Synthetic epitope
RGLESVDSEA

SEQ ID NO: 40982 - protein, 10 aa, Artificial Sequence
  Description of Artificial Sequence: Synthetic epitope
RGLFNHEVKS

SEQ ID NO: 40983 - protein, 10 aa, Artificial Sequence
  Description of Artificial Sequence: Synthetic epitope
RGLHAITDRE

SEQ ID NO: 40984 - protein, 10 aa, Artificial Sequence
  Description of Artificial Sequence: Synthetic epitope
RGLLGALTST

SEQ ID NO: 40985 - protein, 10 aa, Artificial Sequence
  Description of Artificial Sequence: Synthetic epitope
RGLNSSNNSH

SEQ ID NO: 40986 - protein, 10 aa, Artificial Sequence
  Description of Artificial Sequence: Synthetic epitope
RGLRLLKVTQ

SEQ ID NO: 40987 - protein, 10 aa, Artificial Sequence
  Description of Artificial Sequence: Synthetic epitope
RGLSAVVSQA

SEQ ID NO: 40988 - protein, 10 aa, Artificial Sequence
  Description of Artificial Sequence: Synthetic epitope
RGLSLAKAFQ

SEQ ID NO: 40989 - protein, 10 aa, Artificial Sequence
  Description of Artificial Sequence: Synthetic epitope
RGLSNARKFL

SEQ ID NO: 40990 - protein, 10 aa, Artificial Sequence
  Description of Artificial Sequence: Synthetic epitope
RGLSSAARER

SEQ ID NO: 40991 - protein, 10 aa, Artificial Sequence
  Description of Artificial Sequence: Synthetic epitope
RGLSSEARAS

SEQ ID NO: 40992 - protein, 10 aa, Artificial Sequence
  Description of Artificial Sequence: Synthetic epitope
RGLTKAGAKK

SEQ ID NO: 40993 - protein, 10 aa, Artificial Sequence
  Description of Artificial Sequence: Synthetic epitope
RGLVEAIDTQ

SEQ ID NO: 40994 - protein, 10 aa, Artificial Sequence
  Description of Artificial Sequence: Synthetic epitope
RGMEADMPDE

SEQ ID NO: 40995 - protein, 10 aa, Artificial Sequence
  Description of Artificial Sequence: Synthetic epitope
RGMVEIELFR

SEQ ID NO: 40996 - protein, 10 aa, Artificial Sequence
  Description of Artificial Sequence: Synthetic epitope
RGNIAEDTEV

SEQ ID NO: 40997 - protein, 10 aa, Artificial Sequence
  Description of Artificial Sequence: Synthetic epitope
RGNISVKAVK

SEQ ID NO: 40998 - protein, 10 aa, Artificial Sequence
  Description of Artificial Sequence: Synthetic epitope
RGNKRQIQLE

SEQ ID NO: 40999 - protein, 10 aa, Artificial Sequence
  Description of Artificial Sequence: Synthetic epitope
RGNLNLSPTS

SEQ ID NO: 41000 - protein, 10 aa, Artificial Sequence
  Description of Artificial Sequence: Synthetic epitope
RGNSIEAEVE

SEQ ID NO: 41001 - protein, 10 aa, Artificial Sequence
  Description of Artificial Sequence: Synthetic epitope
RGNYMTFKKM

SEQ ID NO: 41002 - protein, 10 aa, Artificial Sequence
  Description of Artificial Sequence: Synthetic epitope
RGPAETEATT

SEQ ID NO: 41003 - protein, 10 aa, Artificial Sequence
  Description of Artificial Sequence: Synthetic epitope
RGPELKQASR

SEQ ID NO: 41004 - protein, 10 aa, Artificial Sequence
  Description of Artificial Sequence: Synthetic epitope
RGPEQTMDPK

SEQ ID NO: 41005 - protein, 10 aa, Artificial Sequence
  Description of Artificial Sequence: Synthetic epitope
RGPSSLMKKA

SEQ ID NO: 41006 - protein, 10 aa, Artificial Sequence
  Description of Artificial Sequence: Synthetic epitope
RGQATDIAIQ

SEQ ID NO: 41007 - protein, 10 aa, Artificial Sequence
  Description of Artificial Sequence: Synthetic epitope
RGQDSDSISS

SEQ ID NO: 41008 - protein, 10 aa, Artificial Sequence
  Description of Artificial Sequence: Synthetic epitope
RGQETAQLVG

SEQ ID NO: 41009 - protein, 10 aa, Artificial Sequence
  Description of Artificial Sequence: Synthetic epitope
RGQETESLDP

SEQ ID NO: 41010 - protein, 10 aa, Artificial Sequence
  Description of Artificial Sequence: Synthetic epitope
RGQETVSSEL

SEQ ID NO: 41011 - protein, 10 aa, Artificial Sequence
  Description of Artificial Sequence: Synthetic epitope
RGQIQSLQQS

SEQ ID NO: 41012 - protein, 10 aa, Artificial Sequence
  Description of Artificial Sequence: Synthetic epitope
RGQKKIGNPL

SEQ ID NO: 41013 - protein, 10 aa, Artificial Sequence
  Description of Artificial Sequence: Synthetic epitope
RGQKTAETDA

SEQ ID NO: 41014 - protein, 10 aa, Artificial Sequence
  Description of Artificial Sequence: Synthetic epitope
RGQKTRRKNT

SEQ ID NO: 41015 - protein, 10 aa, Artificial Sequence
  Description of Artificial Sequence: Synthetic epitope
RGQKVKTQLV

SEQ ID NO: 41016 - protein, 10 aa, Artificial Sequence
  Description of Artificial Sequence: Synthetic epitope
RGQLTKVQAK

SEQ ID NO: 41017 - protein, 10 aa, Artificial Sequence
  Description of Artificial Sequence: Synthetic epitope
RGQMTQTHRS

SEQ ID NO: 41018 - protein, 10 aa, Artificial Sequence
  Description of Artificial Sequence: Synthetic epitope
RGQQIQRLQT

SEQ ID NO: 41019 - protein, 10 aa, Artificial Sequence
  Description of Artificial Sequence: Synthetic epitope
RGQRASRLQA

SEQ ID NO: 41020 - protein, 10 aa, Artificial Sequence
  Description of Artificial Sequence: Synthetic epitope
RGQRDNAGAA

SEQ ID NO: 41021 - protein, 10 aa, Artificial Sequence
  Description of Artificial Sequence: Synthetic epitope
RGRAGATSGE

SEQ ID NO: 41022 - protein, 10 aa, Artificial Sequence
  Description of Artificial Sequence: Synthetic epitope
RGRAQAAQDK

SEQ ID NO: 41023 - protein, 10 aa, Artificial Sequence
  Description of Artificial Sequence: Synthetic epitope
RGRFAKSQSK

SEQ ID NO: 41024 - protein, 10 aa, Artificial Sequence
  Description of Artificial Sequence: Synthetic epitope
RGRGEAAWNN

SEQ ID NO: 41025 - protein, 10 aa, Artificial Sequence
  Description of Artificial Sequence: Synthetic epitope
RGRGVAAMQS

SEQ ID NO: 41026 - protein, 10 aa, Artificial Sequence
  Description of Artificial Sequence: Synthetic epitope
RGRLLAGAYH

SEQ ID NO: 41027 - protein, 10 aa, Artificial Sequence
  Description of Artificial Sequence: Synthetic epitope
RGRNSNKGLP

SEQ ID NO: 41028 - protein, 10 aa, Artificial Sequence
  Description of Artificial Sequence: Synthetic epitope
RGRPKSASAK

SEQ ID NO: 41029 - protein, 10 aa, Artificial Sequence
  Description of Artificial Sequence: Synthetic epitope
RGRQEQTQRD

SEQ ID NO: 41030 - protein, 10 aa, Artificial Sequence
  Description of Artificial Sequence: Synthetic epitope
RGRRVGTYVP

SEQ ID NO: 41031 - protein, 10 aa, Artificial Sequence
  Description of Artificial Sequence: Synthetic epitope
RGRTRVRSEA

SEQ ID NO: 41032 - protein, 10 aa, Artificial Sequence
  Description of Artificial Sequence: Synthetic epitope
RGRVTQASVK

SEQ ID NO: 41033 - protein, 10 aa, Artificial Sequence
  Description of Artificial Sequence: Synthetic epitope
RGSALQKRLR

SEQ ID NO: 41034 - protein, 10 aa, Artificial Sequence
  Description of Artificial Sequence: Synthetic epitope
RGSENSHSSQ

SEQ ID NO: 41035 - protein, 10 aa, Artificial Sequence
  Description of Artificial Sequence: Synthetic epitope
RGSGAIQTIK

SEQ ID NO: 41036 - protein, 10 aa, Artificial Sequence
  Description of Artificial Sequence: Synthetic epitope
RGSGIKTSKH

SEQ ID NO: 41037 - protein, 10 aa, Artificial Sequence
  Description of Artificial Sequence: Synthetic epitope
RGSIKKSSVG

SEQ ID NO: 41038 - protein, 10 aa, Artificial Sequence
  Description of Artificial Sequence: Synthetic epitope
RGSKETATQP

SEQ ID NO: 41039 - protein, 10 aa, Artificial Sequence
  Description of Artificial Sequence: Synthetic epitope
RGSKGEYQIK

SEQ ID NO: 41040 - protein, 10 aa, Artificial Sequence
  Description of Artificial Sequence: Synthetic epitope
RGSKVSPIMT

SEQ ID NO: 41041 - protein, 10 aa, Artificial Sequence
  Description of Artificial Sequence: Synthetic epitope
RGSLAMSIQR

SEQ ID NO: 41042 - protein, 10 aa, Artificial Sequence
  Description of Artificial Sequence: Synthetic epitope
RGSLVAQAQA

SEQ ID NO: 41043 - protein, 10 aa, Artificial Sequence
  Description of Artificial Sequence: Synthetic epitope
RGSQQMIDQA

SEQ ID NO: 41044 - protein, 10 aa, Artificial Sequence
  Description of Artificial Sequence: Synthetic epitope
RGSRAALLTE

SEQ ID NO: 41045 - protein, 10 aa, Artificial Sequence
  Description of Artificial Sequence: Synthetic epitope
RGSSESELAA

SEQ ID NO: 41046 - protein, 10 aa, Artificial Sequence
  Description of Artificial Sequence: Synthetic epitope
RGSSQKIRWS

SEQ ID NO: 41047 - protein, 10 aa, Artificial Sequence
  Description of Artificial Sequence: Synthetic epitope
RGSSRLALLT

SEQ ID NO: 41048 - protein, 10 aa, Artificial Sequence
  Description of Artificial Sequence: Synthetic epitope
RGSSTAKKED

SEQ ID NO: 41049 - protein, 10 aa, Artificial Sequence
  Description of Artificial Sequence: Synthetic epitope
RGSVVLEKAK

SEQ ID NO: 41050 - protein, 10 aa, Artificial Sequence
  Description of Artificial Sequence: Synthetic epitope
RGTAAEMVAV

SEQ ID NO: 41051 - protein, 10 aa, Artificial Sequence
  Description of Artificial Sequence: Synthetic epitope
RGTATLSNGK

SEQ ID NO: 41052 - protein, 10 aa, Artificial Sequence
  Description of Artificial Sequence: Synthetic epitope
RGTEKSRLEP

SEQ ID NO: 41053 - protein, 10 aa, Artificial Sequence
  Description of Artificial Sequence: Synthetic epitope
RGTIIENTSS

SEQ ID NO: 41054 - protein, 10 aa, Artificial Sequence
  Description of Artificial Sequence: Synthetic epitope
RGTSAEQDNR

SEQ ID NO: 41055 - protein, 10 aa, Artificial Sequence
  Description of Artificial Sequence: Synthetic epitope
RGTTIMTHGN

SEQ ID NO: 41056 - protein, 10 aa, Artificial Sequence
  Description of Artificial Sequence: Synthetic epitope
RGVAASFRFK

SEQ ID NO: 41057 - protein, 10 aa, Artificial Sequence
  Description of Artificial Sequence: Synthetic epitope
RGVKATQASK

SEQ ID NO: 41058 - protein, 10 aa, Artificial Sequence
  Description of Artificial Sequence: Synthetic epitope
RGVKIGVKAD

SEQ ID NO: 41059 - protein, 10 aa, Artificial Sequence
  Description of Artificial Sequence: Synthetic epitope
RGVLRGVTFL

SEQ ID NO: 41060 - protein, 10 aa, Artificial Sequence
  Description of Artificial Sequence: Synthetic epitope
RGVQESTEAR

SEQ ID NO: 41061 - protein, 10 aa, Artificial Sequence
  Description of Artificial Sequence: Synthetic epitope
RGVRRPEFQT

SEQ ID NO: 41062 - protein, 10 aa, Artificial Sequence
  Description of Artificial Sequence: Synthetic epitope
RGVSHAMGGR

SEQ ID NO: 41063 - protein, 10 aa, Artificial Sequence
  Description of Artificial Sequence: Synthetic epitope
RGVSIVSSTR

SEQ ID NO: 41064 - protein, 10 aa, Artificial Sequence
  Description of Artificial Sequence: Synthetic epitope
RGVVDLTQEA

SEQ ID NO: 41065 - protein, 10 aa, Artificial Sequence
  Description of Artificial Sequence: Synthetic epitope
RGVVQQSLTP

SEQ ID NO: 41066 - protein, 10 aa, Artificial Sequence
  Description of Artificial Sequence: Synthetic epitope
RGVVSLSQEL

SEQ ID NO: 41067 - protein, 10 aa, Artificial Sequence
  Description of Artificial Sequence: Synthetic epitope
RGWKHSVTYS

SEQ ID NO: 41068 - protein, 10 aa, Artificial Sequence
  Description of Artificial Sequence: Synthetic epitope
RGYNSSKLHN

SEQ ID NO: 41069 - protein, 10 aa, Artificial Sequence
  Description of Artificial Sequence: Synthetic epitope
RGYSQESTKK

SEQ ID NO: 41070 - protein, 10 aa, Artificial Sequence
  Description of Artificial Sequence: Synthetic epitope
RHAASYSSDS

SEQ ID NO: 41071 - protein, 10 aa, Artificial Sequence
  Description of Artificial Sequence: Synthetic epitope
RHAEVMKKII

SEQ ID NO: 41072 - protein, 10 aa, Artificial Sequence
  Description of Artificial Sequence: Synthetic epitope
RHAKASSPQG

SEQ ID NO: 41073 - protein, 10 aa, Artificial Sequence
  Description of Artificial Sequence: Synthetic epitope
RHARSRESES

SEQ ID NO: 41074 - protein, 10 aa, Artificial Sequence
  Description of Artificial Sequence: Synthetic epitope
RHASREEAEL

SEQ ID NO: 41075 - protein, 10 aa, Artificial Sequence
  Description of Artificial Sequence: Synthetic epitope
RHAWQLTQGA

SEQ ID NO: 41076 - protein, 10 aa, Artificial Sequence
  Description of Artificial Sequence: Synthetic epitope
RHDEAFSTEP

SEQ ID NO: 41077 - protein, 10 aa, Artificial Sequence
  Description of Artificial Sequence: Synthetic epitope
RHDEAFSTEP

SEQ ID NO: 41078 - protein, 10 aa, Artificial Sequence
  Description of Artificial Sequence: Synthetic epitope
RHELKNRDVE

SEQ ID NO: 41079 - protein, 10 aa, Artificial Sequence
  Description of Artificial Sequence: Synthetic epitope
RHERANSESE

SEQ ID NO: 41080 - protein, 10 aa, Artificial Sequence
  Description of Artificial Sequence: Synthetic epitope
RHERIEAPWA

SEQ ID NO: 41081 - protein, 10 aa, Artificial Sequence
  Description of Artificial Sequence: Synthetic epitope
RHESKVRKGL

SEQ ID NO: 41082 - protein, 10 aa, Artificial Sequence
  Description of Artificial Sequence: Synthetic epitope
RHESRSMRIF

SEQ ID NO: 41083 - protein, 10 aa, Artificial Sequence
  Description of Artificial Sequence: Synthetic epitope
RHEVGALVRA

SEQ ID NO: 41084 - protein, 10 aa, Artificial Sequence
  Description of Artificial Sequence: Synthetic epitope
RHFQQIMFIY

SEQ ID NO: 41085 - protein, 10 aa, Artificial Sequence
  Description of Artificial Sequence: Synthetic epitope
RHGELELKEE

SEQ ID NO: 41086 - protein, 10 aa, Artificial Sequence
  Description of Artificial Sequence: Synthetic epitope
RHGENYDDNS

SEQ ID NO: 41087 - protein, 10 aa, Artificial Sequence
  Description of Artificial Sequence: Synthetic epitope
RHGSSQVWKH

SEQ ID NO: 41088 - protein, 10 aa, Artificial Sequence
  Description of Artificial Sequence: Synthetic epitope
RHHEQPETSN

SEQ ID NO: 41089 - protein, 10 aa, Artificial Sequence
  Description of Artificial Sequence: Synthetic epitope
RHHGSSVDSA

SEQ ID NO: 41090 - protein, 10 aa, Artificial Sequence
  Description of Artificial Sequence: Synthetic epitope
RHHSETNFGV

SEQ ID NO: 41091 - protein, 10 aa, Artificial Sequence
  Description of Artificial Sequence: Synthetic epitope
RHIDGREESF

SEQ ID NO: 41092 - protein, 10 aa, Artificial Sequence
  Description of Artificial Sequence: Synthetic epitope
RHILESYSEN

SEQ ID NO: 41093 - protein, 10 aa, Artificial Sequence
  Description of Artificial Sequence: Synthetic epitope
RHKRETLKAT

SEQ ID NO: 41094 - protein, 10 aa, Artificial Sequence
  Description of Artificial Sequence: Synthetic epitope
RHKSASNGSK

SEQ ID NO: 41095 - protein, 10 aa, Artificial Sequence
  Description of Artificial Sequence: Synthetic epitope
RHLPTRSLEA

SEQ ID NO: 41096 - protein, 10 aa, Artificial Sequence
  Description of Artificial Sequence: Synthetic epitope
RHLQMQATKE

SEQ ID NO: 41097 - protein, 10 aa, Artificial Sequence
  Description of Artificial Sequence: Synthetic epitope
RHLTAVQDEN

SEQ ID NO: 41098 - protein, 10 aa, Artificial Sequence
  Description of Artificial Sequence: Synthetic epitope
RHLVEAASRE

SEQ ID NO: 41099 - protein, 10 aa, Artificial Sequence
  Description of Artificial Sequence: Synthetic epitope
RHMVRFDPGT

SEQ ID NO: 41100 - protein, 10 aa, Artificial Sequence
  Description of Artificial Sequence: Synthetic epitope
RHNHHQELAA

SEQ ID NO: 41101 - protein, 10 aa, Artificial Sequence
  Description of Artificial Sequence: Synthetic epitope
RHNKATENKE

SEQ ID NO: 41102 - protein, 10 aa, Artificial Sequence
  Description of Artificial Sequence: Synthetic epitope
RHNLNNVIAS

SEQ ID NO: 41103 - protein, 10 aa, Artificial Sequence
  Description of Artificial Sequence: Synthetic epitope
RHPHTEHVQQ

SEQ ID NO: 41104 - protein, 10 aa, Artificial Sequence
  Description of Artificial Sequence: Synthetic epitope
RHPHVTRQSQ

SEQ ID NO: 41105 - protein, 10 aa, Artificial Sequence
  Description of Artificial Sequence: Synthetic epitope
RHPRFGSGMS

SEQ ID NO: 41106 - protein, 10 aa, Artificial Sequence
  Description of Artificial Sequence: Synthetic epitope
RHQSKTKSQN

SEQ ID NO: 41107 - protein, 10 aa, Artificial Sequence
  Description of Artificial Sequence: Synthetic epitope
RHQYNAQLSR

SEQ ID NO: 41108 - protein, 10 aa, Artificial Sequence
  Description of Artificial Sequence: Synthetic epitope
RHRDSTSQHA

SEQ ID NO: 41109 - protein, 10 aa, Artificial Sequence
  Description of Artificial Sequence: Synthetic epitope
RHRETALSVQ

SEQ ID NO: 41110 - protein, 10 aa, Artificial Sequence
  Description of Artificial Sequence: Synthetic epitope
RHRIYAAFKE

SEQ ID NO: 41111 - protein, 10 aa, Artificial Sequence
  Description of Artificial Sequence: Synthetic epitope
RHRLESARLR

SEQ ID NO: 41112 - protein, 10 aa, Artificial Sequence
  Description of Artificial Sequence: Synthetic epitope
RHRQKTDWEV

SEQ ID NO: 41113 - protein, 10 aa, Artificial Sequence
  Description of Artificial Sequence: Synthetic epitope
RHRTVGTNTP

SEQ ID NO: 41114 - protein, 10 aa, Artificial Sequence
  Description of Artificial Sequence: Synthetic epitope
RHSERFDRNI

SEQ ID NO: 41115 - protein, 10 aa, Artificial Sequence
  Description of Artificial Sequence: Synthetic epitope
RHSKEAQAQK

SEQ ID NO: 41116 - protein, 10 aa, Artificial Sequence
  Description of Artificial Sequence: Synthetic epitope
RHSLESATRV

SEQ ID NO: 41117 - protein, 10 aa, Artificial Sequence
  Description of Artificial Sequence: Synthetic epitope
RHSPKVETTD

SEQ ID NO: 41118 - protein, 10 aa, Artificial Sequence
  Description of Artificial Sequence: Synthetic epitope
RHSPSRSASP

SEQ ID NO: 41119 - protein, 10 aa, Artificial Sequence
  Description of Artificial Sequence: Synthetic epitope
RHSRITFEGK

SEQ ID NO: 41120 - protein, 10 aa, Artificial Sequence
  Description of Artificial Sequence: Synthetic epitope
RHSTRTQHLS

SEQ ID NO: 41121 - protein, 10 aa, Artificial Sequence
  Description of Artificial Sequence: Synthetic epitope
RHTAFVIPKK

SEQ ID NO: 41122 - protein, 10 aa, Artificial Sequence
  Description of Artificial Sequence: Synthetic epitope
RHTEKVQDGT

SEQ ID NO: 41123 - protein, 10 aa, Artificial Sequence
  Description of Artificial Sequence: Synthetic epitope
RHTLNTLVRE

SEQ ID NO: 41124 - protein, 10 aa, Artificial Sequence
  Description of Artificial Sequence: Synthetic epitope
RHTPTKSNTI

SEQ ID NO: 41125 - protein, 10 aa, Artificial Sequence
  Description of Artificial Sequence: Synthetic epitope
RHVIFARTDA

SEQ ID NO: 41126 - protein, 10 aa, Artificial Sequence
  Description of Artificial Sequence: Synthetic epitope
RHVMQQGEQQ

SEQ ID NO: 41127 - protein, 10 aa, Artificial Sequence
  Description of Artificial Sequence: Synthetic epitope
RHVQETTDSI

SEQ ID NO: 41128 - protein, 10 aa, Artificial Sequence
  Description of Artificial Sequence: Synthetic epitope
RHVTRAKVSS

SEQ ID NO: 41129 - protein, 10 aa, Artificial Sequence
  Description of Artificial Sequence: Synthetic epitope
RHVTTRAALT

SEQ ID NO: 41130 - protein, 10 aa, Artificial Sequence
  Description of Artificial Sequence: Synthetic epitope
RHVVSANFTL

SEQ ID NO: 41131 - protein, 10 aa, Artificial Sequence
  Description of Artificial Sequence: Synthetic epitope
RHYEAALAAG

SEQ ID NO: 41132 - protein, 10 aa, Artificial Sequence
  Description of Artificial Sequence: Synthetic epitope
RHYLAASRAF

SEQ ID NO: 41133 - protein, 10 aa, Artificial Sequence
  Description of Artificial Sequence: Synthetic epitope
RHYLRRSSPS

SEQ ID NO: 41134 - protein, 10 aa, Artificial Sequence
  Description of Artificial Sequence: Synthetic epitope
RHYYSITINY

SEQ ID NO: 41135 - protein, 10 aa, Artificial Sequence
  Description of Artificial Sequence: Synthetic epitope
RIAAEVGQSS

SEQ ID NO: 41136 - protein, 10 aa, Artificial Sequence
  Description of Artificial Sequence: Synthetic epitope
RIAAQAVTKN

SEQ ID NO: 41137 - protein, 10 aa, Artificial Sequence
  Description of Artificial Sequence: Synthetic epitope
RIAAQRPREE

SEQ ID NO: 41138 - protein, 10 aa, Artificial Sequence
  Description of Artificial Sequence: Synthetic epitope
RIAARLEARR

SEQ ID NO: 41139 - protein, 10 aa, Artificial Sequence
  Description of Artificial Sequence: Synthetic epitope
RIADSEKSVM

SEQ ID NO: 41140 - protein, 10 aa, Artificial Sequence
  Description of Artificial Sequence: Synthetic epitope
RIAEAATLKP

SEQ ID NO: 41141 - protein, 10 aa, Artificial Sequence
  Description of Artificial Sequence: Synthetic epitope
RIAEAATLKP

SEQ ID NO: 41142 - protein, 10 aa, Artificial Sequence
  Description of Artificial Sequence: Synthetic epitope
RIAEAMLQTT

SEQ ID NO: 41143 - protein, 10 aa, Artificial Sequence
  Description of Artificial Sequence: Synthetic epitope
RIAERKSKEP

SEQ ID NO: 41144 - protein, 10 aa, Artificial Sequence
  Description of Artificial Sequence: Synthetic epitope
RIAISVIEFK

SEQ ID NO: 41145 - protein, 10 aa, Artificial Sequence
  Description of Artificial Sequence: Synthetic epitope
RIAKAIEVLL

SEQ ID NO: 41146 - protein, 10 aa, Artificial Sequence
  Description of Artificial Sequence: Synthetic epitope
RIAKLMADVV

SEQ ID NO: 41147 - protein, 10 aa, Artificial Sequence
  Description of Artificial Sequence: Synthetic epitope
RIALSFQGRP

SEQ ID NO: 41148 - protein, 10 aa, Artificial Sequence
  Description of Artificial Sequence: Synthetic epitope
RIALSLMDQP

SEQ ID NO: 41149 - protein, 10 aa, Artificial Sequence
  Description of Artificial Sequence: Synthetic epitope
RIALTSSELL

SEQ ID NO: 41150 - protein, 10 aa, Artificial Sequence
  Description of Artificial Sequence: Synthetic epitope
RIARLMLESE

SEQ ID NO: 41151 - protein, 10 aa, Artificial Sequence
  Description of Artificial Sequence: Synthetic epitope
RIASKPIIVG

SEQ ID NO: 41152 - protein, 10 aa, Artificial Sequence
  Description of Artificial Sequence: Synthetic epitope
RIASSMSSTF

SEQ ID NO: 41153 - protein, 10 aa, Artificial Sequence
  Description of Artificial Sequence: Synthetic epitope
RIAYLSEVKE

SEQ ID NO: 41154 - protein, 10 aa, Artificial Sequence
  Description of Artificial Sequence: Synthetic epitope
RIDITLSSVK

SEQ ID NO: 41155 - protein, 10 aa, Artificial Sequence
  Description of Artificial Sequence: Synthetic epitope
RIDLKSTVIS

SEQ ID NO: 41156 - protein, 10 aa, Artificial Sequence
  Description of Artificial Sequence: Synthetic epitope
RIDSKHRKNP

SEQ ID NO: 41157 - protein, 10 aa, Artificial Sequence
  Description of Artificial Sequence: Synthetic epitope
RIDTQQLDRQ

SEQ ID NO: 41158 - protein, 10 aa, Artificial Sequence
  Description of Artificial Sequence: Synthetic epitope
RIDVKADVDS

SEQ ID NO: 41159 - protein, 10 aa, Artificial Sequence
  Description of Artificial Sequence: Synthetic epitope
RIDYERVSQE

SEQ ID NO: 41160 - protein, 10 aa, Artificial Sequence
  Description of Artificial Sequence: Synthetic epitope
RIEAASLRLT

SEQ ID NO: 41161 - protein, 10 aa, Artificial Sequence
  Description of Artificial Sequence: Synthetic epitope
RIEHMTQPNR

SEQ ID NO: 41162 - protein, 10 aa, Artificial Sequence
  Description of Artificial Sequence: Synthetic epitope
RIEQKEELDD

SEQ ID NO: 41163 - protein, 10 aa, Artificial Sequence
  Description of Artificial Sequence: Synthetic epitope
RIESSIQSLQ

SEQ ID NO: 41164 - protein, 10 aa, Artificial Sequence
  Description of Artificial Sequence: Synthetic epitope
RIESVKTGLL

SEQ ID NO: 41165 - protein, 10 aa, Artificial Sequence
  Description of Artificial Sequence: Synthetic epitope
RIESVNVAPE

SEQ ID NO: 41166 - protein, 10 aa, Artificial Sequence
  Description of Artificial Sequence: Synthetic epitope
RIETLEQKLT

SEQ ID NO: 41167 - protein, 10 aa, Artificial Sequence
  Description of Artificial Sequence: Synthetic epitope
RIETLQSNAK

SEQ ID NO: 41168 - protein, 10 aa, Artificial Sequence
  Description of Artificial Sequence: Synthetic epitope
RIFETVNSVR

SEQ ID NO: 41169 - protein, 10 aa, Artificial Sequence
  Description of Artificial Sequence: Synthetic epitope
RIFSELNSTE

SEQ ID NO: 41170 - protein, 10 aa, Artificial Sequence
  Description of Artificial Sequence: Synthetic epitope
RIFWRRQVHL

SEQ ID NO: 41171 - protein, 10 aa, Artificial Sequence
  Description of Artificial Sequence: Synthetic epitope
RIGGVIQDTL

SEQ ID NO: 41172 - protein, 10 aa, Artificial Sequence
  Description of Artificial Sequence: Synthetic epitope
RIGLSQLEGF

SEQ ID NO: 41173 - protein, 10 aa, Artificial Sequence
  Description of Artificial Sequence: Synthetic epitope
RIGSMEDSAK

SEQ ID NO: 41174 - protein, 10 aa, Artificial Sequence
  Description of Artificial Sequence: Synthetic epitope
RIHDNRIRKV

SEQ ID NO: 41175 - protein, 10 aa, Artificial Sequence
  Description of Artificial Sequence: Synthetic epitope
RIHHQKTRYI

SEQ ID NO: 41176 - protein, 10 aa, Artificial Sequence
  Description of Artificial Sequence: Synthetic epitope
RIHTPPAKAN

SEQ ID NO: 41177 - protein, 10 aa, Artificial Sequence
  Description of Artificial Sequence: Synthetic epitope
RIHTTEKTNA

SEQ ID NO: 41178 - protein, 10 aa, Artificial Sequence
  Description of Artificial Sequence: Synthetic epitope
RIIAAPRRNS

SEQ ID NO: 41179 - protein, 10 aa, Artificial Sequence
  Description of Artificial Sequence: Synthetic epitope
RIILHAIESV

SEQ ID NO: 41180 - protein, 10 aa, Artificial Sequence
  Description of Artificial Sequence: Synthetic epitope
RIILRLLNSD

SEQ ID NO: 41181 - protein, 10 aa, Artificial Sequence
  Description of Artificial Sequence: Synthetic epitope
RIINHAAGSH

SEQ ID NO: 41182 - protein, 10 aa, Artificial Sequence
  Description of Artificial Sequence: Synthetic epitope
RIISTSRSKN

SEQ ID NO: 41183 - protein, 10 aa, Artificial Sequence
  Description of Artificial Sequence: Synthetic epitope
RIKALQLKIQ

SEQ ID NO: 41184 - protein, 10 aa, Artificial Sequence
  Description of Artificial Sequence: Synthetic epitope
RIKFESLEIK

SEQ ID NO: 41185 - protein, 10 aa, Artificial Sequence
  Description of Artificial Sequence: Synthetic epitope
RIKINELEKK

SEQ ID NO: 41186 - protein, 10 aa, Artificial Sequence
  Description of Artificial Sequence: Synthetic epitope
RIKKGTQQNI

SEQ ID NO: 41187 - protein, 10 aa, Artificial Sequence
  Description of Artificial Sequence: Synthetic epitope
RIKQAFQGAV

SEQ ID NO: 41188 - protein, 10 aa, Artificial Sequence
  Description of Artificial Sequence: Synthetic epitope
RIKTNASDST

SEQ ID NO: 41189 - protein, 10 aa, Artificial Sequence
  Description of Artificial Sequence: Synthetic epitope
RIKTVLLFQR

SEQ ID NO: 41190 - protein, 10 aa, Artificial Sequence
  Description of Artificial Sequence: Synthetic epitope
RIKVSTAHSN

SEQ ID NO: 41191 - protein, 10 aa, Artificial Sequence
  Description of Artificial Sequence: Synthetic epitope
RILDVAQDLK

SEQ ID NO: 41192 - protein, 10 aa, Artificial Sequence
  Description of Artificial Sequence: Synthetic epitope
RILKSQKERQ

SEQ ID NO: 41193 - protein, 10 aa, Artificial Sequence
  Description of Artificial Sequence: Synthetic epitope
RILNTGLSET

SEQ ID NO: 41194 - protein, 10 aa, Artificial Sequence
  Description of Artificial Sequence: Synthetic epitope
RILQASLSSL

SEQ ID NO: 41195 - protein, 10 aa, Artificial Sequence
  Description of Artificial Sequence: Synthetic epitope
RILQVSSKVK

SEQ ID NO: 41196 - protein, 10 aa, Artificial Sequence
  Description of Artificial Sequence: Synthetic epitope
RILRAEKAVA

SEQ ID NO: 41197 - protein, 10 aa, Artificial Sequence
  Description of Artificial Sequence: Synthetic epitope
RILSVQPTYD

SEQ ID NO: 41198 - protein, 10 aa, Artificial Sequence
  Description of Artificial Sequence: Synthetic epitope
RILVESVKNP

SEQ ID NO: 41199 - protein, 10 aa, Artificial Sequence
  Description of Artificial Sequence: Synthetic epitope
RILVQQFEVQ

SEQ ID NO: 41200 - protein, 10 aa, Artificial Sequence
  Description of Artificial Sequence: Synthetic epitope
RIMETASKSQ

SEQ ID NO: 41201 - protein, 10 aa, Artificial Sequence
  Description of Artificial Sequence: Synthetic epitope
RIMFGAKGQV

SEQ ID NO: 41202 - protein, 10 aa, Artificial Sequence
  Description of Artificial Sequence: Synthetic epitope
RIMKNAIPQT

SEQ ID NO: 41203 - protein, 10 aa, Artificial Sequence
  Description of Artificial Sequence: Synthetic epitope
RINQEATPGD

SEQ ID NO: 41204 - protein, 10 aa, Artificial Sequence
  Description of Artificial Sequence: Synthetic epitope
RINQGQMLVT

SEQ ID NO: 41205 - protein, 10 aa, Artificial Sequence
  Description of Artificial Sequence: Synthetic epitope
RINTDLLPTS

SEQ ID NO: 41206 - protein, 10 aa, Artificial Sequence
  Description of Artificial Sequence: Synthetic epitope
RIPIKLISKQ

SEQ ID NO: 41207 - protein, 10 aa, Artificial Sequence
  Description of Artificial Sequence: Synthetic epitope
RIPITSVINE

SEQ ID NO: 41208 - protein, 10 aa, Artificial Sequence
  Description of Artificial Sequence: Synthetic epitope
RIPLKSKAIS

SEQ ID NO: 41209 - protein, 10 aa, Artificial Sequence
  Description of Artificial Sequence: Synthetic epitope
RIPPLSRIAP

SEQ ID NO: 41210 - protein, 10 aa, Artificial Sequence
  Description of Artificial Sequence: Synthetic epitope
RIPRFEEVEE

SEQ ID NO: 41211 - protein, 10 aa, Artificial Sequence
  Description of Artificial Sequence: Synthetic epitope
RIPTISTQLK

SEQ ID NO: 41212 - protein, 10 aa, Artificial Sequence
  Description of Artificial Sequence: Synthetic epitope
RIPTQVGKKA

SEQ ID NO: 41213 - protein, 10 aa, Artificial Sequence
  Description of Artificial Sequence: Synthetic epitope
RIPVESAPMF

SEQ ID NO: 41214 - protein, 10 aa, Artificial Sequence
  Description of Artificial Sequence: Synthetic epitope
RIQAATLQAK

SEQ ID NO: 41215 - protein, 10 aa, Artificial Sequence
  Description of Artificial Sequence: Synthetic epitope
RIQALRASGA

SEQ ID NO: 41216 - protein, 10 aa, Artificial Sequence
  Description of Artificial Sequence: Synthetic epitope
RIQASMAPAA

SEQ ID NO: 41217 - protein, 10 aa, Artificial Sequence
  Description of Artificial Sequence: Synthetic epitope
RIQQIEMSTS

SEQ ID NO: 41218 - protein, 10 aa, Artificial Sequence
  Description of Artificial Sequence: Synthetic epitope
RIQQIPNVRR

SEQ ID NO: 41219 - protein, 10 aa, Artificial Sequence
  Description of Artificial Sequence: Synthetic epitope
RIQRPQVMTT

SEQ ID NO: 41220 - protein, 10 aa, Artificial Sequence
  Description of Artificial Sequence: Synthetic epitope
RIQRQAIVQK

SEQ ID NO: 41221 - protein, 10 aa, Artificial Sequence
  Description of Artificial Sequence: Synthetic epitope
RIQRRISIKK

SEQ ID NO: 41222 - protein, 10 aa, Artificial Sequence
  Description of Artificial Sequence: Synthetic epitope
RIRGSVSAAN

SEQ ID NO: 41223 - protein, 10 aa, Artificial Sequence
  Description of Artificial Sequence: Synthetic epitope
RIRMSARQKQ

SEQ ID NO: 41224 - protein, 10 aa, Artificial Sequence
  Description of Artificial Sequence: Synthetic epitope
RIRPHVLLKV

SEQ ID NO: 41225 - protein, 10 aa, Artificial Sequence
  Description of Artificial Sequence: Synthetic epitope
RIRSDLKAEA

SEQ ID NO: 41226 - protein, 10 aa, Artificial Sequence
  Description of Artificial Sequence: Synthetic epitope
RIRTSKLTTF

SEQ ID NO: 41227 - protein, 10 aa, Artificial Sequence
  Description of Artificial Sequence: Synthetic epitope
RIRTSKTKQA

SEQ ID NO: 41228 - protein, 10 aa, Artificial Sequence
  Description of Artificial Sequence: Synthetic epitope
RISAQDAKQA

SEQ ID NO: 41229 - protein, 10 aa, Artificial Sequence
  Description of Artificial Sequence: Synthetic epitope
RISASSEVAF

SEQ ID NO: 41230 - protein, 10 aa, Artificial Sequence
  Description of Artificial Sequence: Synthetic epitope
RISETTMLQS

SEQ ID NO: 41231 - protein, 10 aa, Artificial Sequence
  Description of Artificial Sequence: Synthetic epitope
RISKSLVKSA

SEQ ID NO: 41232 - protein, 10 aa, Artificial Sequence
  Description of Artificial Sequence: Synthetic epitope
RISLTNEVNV

SEQ ID NO: 41233 - protein, 10 aa, Artificial Sequence
  Description of Artificial Sequence: Synthetic epitope
RISMAMQEGA

SEQ ID NO: 41234 - protein, 10 aa, Artificial Sequence
  Description of Artificial Sequence: Synthetic epitope
RISMSEVASH

SEQ ID NO: 41235 - protein, 10 aa, Artificial Sequence
  Description of Artificial Sequence: Synthetic epitope
RISQIQQLNQ

SEQ ID NO: 41236 - protein, 10 aa, Artificial Sequence
  Description of Artificial Sequence: Synthetic epitope
RISRLMGDYL

SEQ ID NO: 41237 - protein, 10 aa, Artificial Sequence
  Description of Artificial Sequence: Synthetic epitope
RISSAGRKHK

SEQ ID NO: 41238 - protein, 10 aa, Artificial Sequence
  Description of Artificial Sequence: Synthetic epitope
RISSEQTGTS

SEQ ID NO: 41239 - protein, 10 aa, Artificial Sequence
  Description of Artificial Sequence: Synthetic epitope
RISSTSSLVK

SEQ ID NO: 41240 - protein, 10 aa, Artificial Sequence
  Description of Artificial Sequence: Synthetic epitope
RISTPKKSKK

SEQ ID NO: 41241 - protein, 10 aa, Artificial Sequence
  Description of Artificial Sequence: Synthetic epitope
RISTVELQKM

SEQ ID NO: 41242 - protein, 10 aa, Artificial Sequence
  Description of Artificial Sequence: Synthetic epitope
RISVADPMVL

SEQ ID NO: 41243 - protein, 10 aa, Artificial Sequence
  Description of Artificial Sequence: Synthetic epitope
RITESTGAIT

SEQ ID NO: 41244 - protein, 10 aa, Artificial Sequence
  Description of Artificial Sequence: Synthetic epitope
RITIEILKSK

SEQ ID NO: 41245 - protein, 10 aa, Artificial Sequence
  Description of Artificial Sequence: Synthetic epitope
RITQSLMKMK

SEQ ID NO: 41246 - protein, 10 aa, Artificial Sequence
  Description of Artificial Sequence: Synthetic epitope
RITSRIIRSS

SEQ ID NO: 41247 - protein, 10 aa, Artificial Sequence
  Description of Artificial Sequence: Synthetic epitope
RITVYMVLNE

SEQ ID NO: 41248 - protein, 10 aa, Artificial Sequence
  Description of Artificial Sequence: Synthetic epitope
RIVESPLSAL

SEQ ID NO: 41249 - protein, 10 aa, Artificial Sequence
  Description of Artificial Sequence: Synthetic epitope
RIVNRLRTSL

SEQ ID NO: 41250 - protein, 10 aa, Artificial Sequence
  Description of Artificial Sequence: Synthetic epitope
RIVQEALSAS

SEQ ID NO: 41251 - protein, 10 aa, Artificial Sequence
  Description of Artificial Sequence: Synthetic epitope
RIVSVRSGRE

SEQ ID NO: 41252 - protein, 10 aa, Artificial Sequence
  Description of Artificial Sequence: Synthetic epitope
RIVTETVTTR

SEQ ID NO: 41253 - protein, 10 aa, Artificial Sequence
  Description of Artificial Sequence: Synthetic epitope
RIYASLRIEE

SEQ ID NO: 41254 - protein, 10 aa, Artificial Sequence
  Description of Artificial Sequence: Synthetic epitope
RKAAKMYTDK

SEQ ID NO: 41255 - protein, 10 aa, Artificial Sequence
  Description of Artificial Sequence: Synthetic epitope
RKAAQRSAPS

SEQ ID NO: 41256 - protein, 10 aa, Artificial Sequence
  Description of Artificial Sequence: Synthetic epitope
RKADHEADKK

SEQ ID NO: 41257 - protein, 10 aa, Artificial Sequence
  Description of Artificial Sequence: Synthetic epitope
RKAEAALRKA

SEQ ID NO: 41258 - protein, 10 aa, Artificial Sequence
  Description of Artificial Sequence: Synthetic epitope
RKAEEKTVIF

SEQ ID NO: 41259 - protein, 10 aa, Artificial Sequence
  Description of Artificial Sequence: Synthetic epitope
RKAIEIDEQQ

SEQ ID NO: 41260 - protein, 10 aa, Artificial Sequence
  Description of Artificial Sequence: Synthetic epitope
RKAIQISQQT

SEQ ID NO: 41261 - protein, 10 aa, Artificial Sequence
  Description of Artificial Sequence: Synthetic epitope
RKAITAVALK

SEQ ID NO: 41262 - protein, 10 aa, Artificial Sequence
  Description of Artificial Sequence: Synthetic epitope
RKAIVAAKSK

SEQ ID NO: 41263 - protein, 10 aa, Artificial Sequence
  Description of Artificial Sequence: Synthetic epitope
RKAKEAMKAQ

SEQ ID NO: 41264 - protein, 10 aa, Artificial Sequence
  Description of Artificial Sequence: Synthetic epitope
RKAKISAVAF

SEQ ID NO: 41265 - protein, 10 aa, Artificial Sequence
  Description of Artificial Sequence: Synthetic epitope
RKAKKIIDSE

SEQ ID NO: 41266 - protein, 10 aa, Artificial Sequence
  Description of Artificial Sequence: Synthetic epitope
RKAKSQNRQA

SEQ ID NO: 41267 - protein, 10 aa, Artificial Sequence
  Description of Artificial Sequence: Synthetic epitope
RKAKSTRNIE

SEQ ID NO: 41268 - protein, 10 aa, Artificial Sequence
  Description of Artificial Sequence: Synthetic epitope
RKALAVLEKT

SEQ ID NO: 41269 - protein, 10 aa, Artificial Sequence
  Description of Artificial Sequence: Synthetic epitope
RKALSETSSN

SEQ ID NO: 41270 - protein, 10 aa, Artificial Sequence
  Description of Artificial Sequence: Synthetic epitope
RKAMESAEQK

SEQ ID NO: 41271 - protein, 10 aa, Artificial Sequence
  Description of Artificial Sequence: Synthetic epitope
RKANLLRQNE

SEQ ID NO: 41272 - protein, 10 aa, Artificial Sequence
  Description of Artificial Sequence: Synthetic epitope
RKANLQQAIV

SEQ ID NO: 41273 - protein, 10 aa, Artificial Sequence
  Description of Artificial Sequence: Synthetic epitope
RKAPQAVSDT

SEQ ID NO: 41274 - protein, 10 aa, Artificial Sequence
  Description of Artificial Sequence: Synthetic epitope
RKARSYIKHR

SEQ ID NO: 41275 - protein, 10 aa, Artificial Sequence
  Description of Artificial Sequence: Synthetic epitope
RKARTSTQGR

SEQ ID NO: 41276 - protein, 10 aa, Artificial Sequence
  Description of Artificial Sequence: Synthetic epitope
RKASKRGMEQ

SEQ ID NO: 41277 - protein, 10 aa, Artificial Sequence
  Description of Artificial Sequence: Synthetic epitope
RKATASRLVT

SEQ ID NO: 41278 - protein, 10 aa, Artificial Sequence
  Description of Artificial Sequence: Synthetic epitope
RKATDAKDPS

SEQ ID NO: 41279 - protein, 10 aa, Artificial Sequence
  Description of Artificial Sequence: Synthetic epitope
RKATQTIQPQ

SEQ ID NO: 41280 - protein, 10 aa, Artificial Sequence
  Description of Artificial Sequence: Synthetic epitope
RKAVESIQAE

SEQ ID NO: 41281 - protein, 10 aa, Artificial Sequence
  Description of Artificial Sequence: Synthetic epitope
RKAVKAEFGG

SEQ ID NO: 41282 - protein, 10 aa, Artificial Sequence
  Description of Artificial Sequence: Synthetic epitope
RKAVKIRERT

SEQ ID NO: 41283 - protein, 10 aa, Artificial Sequence
  Description of Artificial Sequence: Synthetic epitope
RKAVTHAIPA

SEQ ID NO: 41284 - protein, 10 aa, Artificial Sequence
  Description of Artificial Sequence: Synthetic epitope
RKAYEESRAG

SEQ ID NO: 41285 - protein, 10 aa, Artificial Sequence
  Description of Artificial Sequence: Synthetic epitope
RKAYSAAGVS

SEQ ID NO: 41286 - protein, 10 aa, Artificial Sequence
  Description of Artificial Sequence: Synthetic epitope
RKDAGKTDSS

SEQ ID NO: 41287 - protein, 10 aa, Artificial Sequence
  Description of Artificial Sequence: Synthetic epitope
RKDASKATGG

SEQ ID NO: 41288 - protein, 10 aa, Artificial Sequence
  Description of Artificial Sequence: Synthetic epitope
RKDEQVEKEN

SEQ ID NO: 41289 - protein, 10 aa, Artificial Sequence
  Description of Artificial Sequence: Synthetic epitope
RKDETSTSGN

SEQ ID NO: 41290 - protein, 10 aa, Artificial Sequence
  Description of Artificial Sequence: Synthetic epitope
RKDHIDYQKD

SEQ ID NO: 41291 - protein, 10 aa, Artificial Sequence
  Description of Artificial Sequence: Synthetic epitope
RKDKLEHSQQ

SEQ ID NO: 41292 - protein, 10 aa, Artificial Sequence
  Description of Artificial Sequence: Synthetic epitope
RKDKRVLRKK

SEQ ID NO: 41293 - protein, 10 aa, Artificial Sequence
  Description of Artificial Sequence: Synthetic epitope
RKDLFSSRSK

SEQ ID NO: 41294 - protein, 10 aa, Artificial Sequence
  Description of Artificial Sequence: Synthetic epitope
RKDMVRSSFV

SEQ ID NO: 41295 - protein, 10 aa, Artificial Sequence
  Description of Artificial Sequence: Synthetic epitope
RKDTGVQKGD

SEQ ID NO: 41296 - protein, 10 aa, Artificial Sequence
  Description of Artificial Sequence: Synthetic epitope
RKDVAVVQRK

SEQ ID NO: 41297 - protein, 10 aa, Artificial Sequence
  Description of Artificial Sequence: Synthetic epitope
RKDVEVKESK

SEQ ID NO: 41298 - protein, 10 aa, Artificial Sequence
  Description of Artificial Sequence: Synthetic epitope
RKEADAVFPR

SEQ ID NO: 41299 - protein, 10 aa, Artificial Sequence
  Description of Artificial Sequence: Synthetic epitope
RKEATDMGSV

SEQ ID NO: 41300 - protein, 10 aa, Artificial Sequence
  Description of Artificial Sequence: Synthetic epitope
RKEDNYDTHN

SEQ ID NO: 41301 - protein, 10 aa, Artificial Sequence
  Description of Artificial Sequence: Synthetic epitope
RKEEILLIKA

SEQ ID NO: 41302 - protein, 10 aa, Artificial Sequence
  Description of Artificial Sequence: Synthetic epitope
RKEETQKRPV

SEQ ID NO: 41303 - protein, 10 aa, Artificial Sequence
  Description of Artificial Sequence: Synthetic epitope
RKEGSSEISQ

SEQ ID NO: 41304 - protein, 10 aa, Artificial Sequence
  Description of Artificial Sequence: Synthetic epitope
RKEHMALKAV

SEQ ID NO: 41305 - protein, 10 aa, Artificial Sequence
  Description of Artificial Sequence: Synthetic epitope
RKEIMQKKLE

SEQ ID NO: 41306 - protein, 10 aa, Artificial Sequence
  Description of Artificial Sequence: Synthetic epitope
RKEIQDKSEE

SEQ ID NO: 41307 - protein, 10 aa, Artificial Sequence
  Description of Artificial Sequence: Synthetic epitope
RKEISDMNPS

SEQ ID NO: 41308 - protein, 10 aa, Artificial Sequence
  Description of Artificial Sequence: Synthetic epitope
RKEISKLKQQ

SEQ ID NO: 41309 - protein, 10 aa, Artificial Sequence
  Description of Artificial Sequence: Synthetic epitope
RKEKAEASNA

SEQ ID NO: 41310 - protein, 10 aa, Artificial Sequence
  Description of Artificial Sequence: Synthetic epitope
RKEKAEASNA

SEQ ID NO: 41311 - protein, 10 aa, Artificial Sequence
  Description of Artificial Sequence: Synthetic epitope
RKEKAKQRPL

SEQ ID NO: 41312 - protein, 10 aa, Artificial Sequence
  Description of Artificial Sequence: Synthetic epitope
RKEKSGKTSS

SEQ ID NO: 41313 - protein, 10 aa, Artificial Sequence
  Description of Artificial Sequence: Synthetic epitope
RKEKSLQRGL

SEQ ID NO: 41314 - protein, 10 aa, Artificial Sequence
  Description of Artificial Sequence: Synthetic epitope
RKELSKSKSN

SEQ ID NO: 41315 - protein, 10 aa, Artificial Sequence
  Description of Artificial Sequence: Synthetic epitope
RKELTRAVSQ

SEQ ID NO: 41316 - protein, 10 aa, Artificial Sequence
  Description of Artificial Sequence: Synthetic epitope
RKENEKQKNE

SEQ ID NO: 41317 - protein, 10 aa, Artificial Sequence
  Description of Artificial Sequence: Synthetic epitope
RKENQANTSV

SEQ ID NO: 41318 - protein, 10 aa, Artificial Sequence
  Description of Artificial Sequence: Synthetic epitope
RKENVAKSLA

SEQ ID NO: 41319 - protein, 10 aa, Artificial Sequence
  Description of Artificial Sequence: Synthetic epitope
RKEPNKSIKH

SEQ ID NO: 41320 - protein, 10 aa, Artificial Sequence
  Description of Artificial Sequence: Synthetic epitope
RKEQEARIEQ

SEQ ID NO: 41321 - protein, 10 aa, Artificial Sequence
  Description of Artificial Sequence: Synthetic epitope
RKEQREEFEH

SEQ ID NO: 41322 - protein, 10 aa, Artificial Sequence
  Description of Artificial Sequence: Synthetic epitope
RKEQTLISMP

SEQ ID NO: 41323 - protein, 10 aa, Artificial Sequence
  Description of Artificial Sequence: Synthetic epitope
RKEREAAVAA

SEQ ID NO: 41324 - protein, 10 aa, Artificial Sequence
  Description of Artificial Sequence: Synthetic epitope
RKERSSYDSS

SEQ ID NO: 41325 - protein, 10 aa, Artificial Sequence
  Description of Artificial Sequence: Synthetic epitope
RKESLTSSES

SEQ ID NO: 41326 - protein, 10 aa, Artificial Sequence
  Description of Artificial Sequence: Synthetic epitope
RKESSQSSTQ

SEQ ID NO: 41327 - protein, 10 aa, Artificial Sequence
  Description of Artificial Sequence: Synthetic epitope
RKETEHVSAL

SEQ ID NO: 41328 - protein, 10 aa, Artificial Sequence
  Description of Artificial Sequence: Synthetic epitope
RKETKALELK

SEQ ID NO: 41329 - protein, 10 aa, Artificial Sequence
  Description of Artificial Sequence: Synthetic epitope
RKETPSATKQ

SEQ ID NO: 41330 - protein, 10 aa, Artificial Sequence
  Description of Artificial Sequence: Synthetic epitope
RKETSSKSSQ

SEQ ID NO: 41331 - protein, 10 aa, Artificial Sequence
  Description of Artificial Sequence: Synthetic epitope
RKEVAETSAG

SEQ ID NO: 41332 - protein, 10 aa, Artificial Sequence
  Description of Artificial Sequence: Synthetic epitope
RKEVDASEIQ

SEQ ID NO: 41333 - protein, 10 aa, Artificial Sequence
  Description of Artificial Sequence: Synthetic epitope
RKEVEVVEII

SEQ ID NO: 41334 - protein, 10 aa, Artificial Sequence
  Description of Artificial Sequence: Synthetic epitope
RKEVPKQQAA

SEQ ID NO: 41335 - protein, 10 aa, Artificial Sequence
  Description of Artificial Sequence: Synthetic epitope
RKFGWEYNQQ

SEQ ID NO: 41336 - protein, 10 aa, Artificial Sequence
  Description of Artificial Sequence: Synthetic epitope
RKFIVRTKKQ

SEQ ID NO: 41337 - protein, 10 aa, Artificial Sequence
  Description of Artificial Sequence: Synthetic epitope
RKFKEQEQDD

SEQ ID NO: 41338 - protein, 10 aa, Artificial Sequence
  Description of Artificial Sequence: Synthetic epitope
RKFLALLREE

SEQ ID NO: 41339 - protein, 10 aa, Artificial Sequence
  Description of Artificial Sequence: Synthetic epitope
RKFMDLVRSA

SEQ ID NO: 41340 - protein, 10 aa, Artificial Sequence
  Description of Artificial Sequence: Synthetic epitope
RKFNTLFAQG

SEQ ID NO: 41341 - protein, 10 aa, Artificial Sequence
  Description of Artificial Sequence: Synthetic epitope
RKFPAVETRN

SEQ ID NO: 41342 - protein, 10 aa, Artificial Sequence
  Description of Artificial Sequence: Synthetic epitope
RKFVEAMAEY

SEQ ID NO: 41343 - protein, 10 aa, Artificial Sequence
  Description of Artificial Sequence: Synthetic epitope
RKFVISIDTI

SEQ ID NO: 41344 - protein, 10 aa, Artificial Sequence
  Description of Artificial Sequence: Synthetic epitope
RKFVTKSSKK

SEQ ID NO: 41345 - protein, 10 aa, Artificial Sequence
  Description of Artificial Sequence: Synthetic epitope
RKGARSSISI

SEQ ID NO: 41346 - protein, 10 aa, Artificial Sequence
  Description of Artificial Sequence: Synthetic epitope
RKGASVSGLS

SEQ ID NO: 41347 - protein, 10 aa, Artificial Sequence
  Description of Artificial Sequence: Synthetic epitope
RKGKRKRTET

SEQ ID NO: 41348 - protein, 10 aa, Artificial Sequence
  Description of Artificial Sequence: Synthetic epitope
RKGNAIDEAD

SEQ ID NO: 41349 - protein, 10 aa, Artificial Sequence
  Description of Artificial Sequence: Synthetic epitope
RKGSGKKSET

SEQ ID NO: 41350 - protein, 10 aa, Artificial Sequence
  Description of Artificial Sequence: Synthetic epitope
RKGSQMSTDT

SEQ ID NO: 41351 - protein, 10 aa, Artificial Sequence
  Description of Artificial Sequence: Synthetic epitope
RKGSSAVGSD

SEQ ID NO: 41352 - protein, 10 aa, Artificial Sequence
  Description of Artificial Sequence: Synthetic epitope
RKGTKAQRRN

SEQ ID NO: 41353 - protein, 10 aa, Artificial Sequence
  Description of Artificial Sequence: Synthetic epitope
RKGVSASAVP

SEQ ID NO: 41354 - protein, 10 aa, Artificial Sequence
  Description of Artificial Sequence: Synthetic epitope
RKGWQAHQRP

SEQ ID NO: 41355 - protein, 10 aa, Artificial Sequence
  Description of Artificial Sequence: Synthetic epitope
RKHEDYMQDQ

SEQ ID NO: 41356 - protein, 10 aa, Artificial Sequence
  Description of Artificial Sequence: Synthetic epitope
RKHEFMSDTN

SEQ ID NO: 41357 - protein, 10 aa, Artificial Sequence
  Description of Artificial Sequence: Synthetic epitope
RKHKENVKDY

SEQ ID NO: 41358 - protein, 10 aa, Artificial Sequence
  Description of Artificial Sequence: Synthetic epitope
RKHKVADEDS

SEQ ID NO: 41359 - protein, 10 aa, Artificial Sequence
  Description of Artificial Sequence: Synthetic epitope
RKHLAYLIAD

SEQ ID NO: 41360 - protein, 10 aa, Artificial Sequence
  Description of Artificial Sequence: Synthetic epitope
RKHSLTKNDS

SEQ ID NO: 41361 - protein, 10 aa, Artificial Sequence
  Description of Artificial Sequence: Synthetic epitope
RKIAAQSEEW

SEQ ID NO: 41362 - protein, 10 aa, Artificial Sequence
  Description of Artificial Sequence: Synthetic epitope
RKIASLSRPV

SEQ ID NO: 41363 - protein, 10 aa, Artificial Sequence
  Description of Artificial Sequence: Synthetic epitope
RKIERKKFII

SEQ ID NO: 41364 - protein, 10 aa, Artificial Sequence
  Description of Artificial Sequence: Synthetic epitope
RKIHSSRTQR

SEQ ID NO: 41365 - protein, 10 aa, Artificial Sequence
  Description of Artificial Sequence: Synthetic epitope
RKIIMVHPKV

SEQ ID NO: 41366 - protein, 10 aa, Artificial Sequence
  Description of Artificial Sequence: Synthetic epitope
RKIKKLAESH

SEQ ID NO: 41367 - protein, 10 aa, Artificial Sequence
  Description of Artificial Sequence: Synthetic epitope
RKIKSKIHGN

SEQ ID NO: 41368 - protein, 10 aa, Artificial Sequence
  Description of Artificial Sequence: Synthetic epitope
RKIKSNDSEV

SEQ ID NO: 41369 - protein, 10 aa, Artificial Sequence
  Description of Artificial Sequence: Synthetic epitope
RKILAEKRAA

SEQ ID NO: 41370 - protein, 10 aa, Artificial Sequence
  Description of Artificial Sequence: Synthetic epitope
RKILASQQPD

SEQ ID NO: 41371 - protein, 10 aa, Artificial Sequence
  Description of Artificial Sequence: Synthetic epitope
RKILESDRKE

SEQ ID NO: 41372 - protein, 10 aa, Artificial Sequence
  Description of Artificial Sequence: Synthetic epitope
RKILKLPHSS

SEQ ID NO: 41373 - protein, 10 aa, Artificial Sequence
  Description of Artificial Sequence: Synthetic epitope
RKIMRTLYKK

SEQ ID NO: 41374 - protein, 10 aa, Artificial Sequence
  Description of Artificial Sequence: Synthetic epitope
RKINHEMANG

SEQ ID NO: 41375 - protein, 10 aa, Artificial Sequence
  Description of Artificial Sequence: Synthetic epitope
RKIQEKALGP

SEQ ID NO: 41376 - protein, 10 aa, Artificial Sequence
  Description of Artificial Sequence: Synthetic epitope
RKIQSSLSSA

SEQ ID NO: 41377 - protein, 10 aa, Artificial Sequence
  Description of Artificial Sequence: Synthetic epitope
RKISNIRAQP

SEQ ID NO: 41378 - protein, 10 aa, Artificial Sequence
  Description of Artificial Sequence: Synthetic epitope
RKISQETVKA

SEQ ID NO: 41379 - protein, 10 aa, Artificial Sequence
  Description of Artificial Sequence: Synthetic epitope
RKIYTMIYRN

SEQ ID NO: 41380 - protein, 10 aa, Artificial Sequence
  Description of Artificial Sequence: Synthetic epitope
RKKDQATENT

SEQ ID NO: 41381 - protein, 10 aa, Artificial Sequence
  Description of Artificial Sequence: Synthetic epitope
RKKELKARTV

SEQ ID NO: 41382 - protein, 10 aa, Artificial Sequence
  Description of Artificial Sequence: Synthetic epitope
RKKEMVLSEK

SEQ ID NO: 41383 - protein, 10 aa, Artificial Sequence
  Description of Artificial Sequence: Synthetic epitope
RKKHRNNEME

SEQ ID NO: 41384 - protein, 10 aa, Artificial Sequence
  Description of Artificial Sequence: Synthetic epitope
RKKIAESEIK

SEQ ID NO: 41385 - protein, 10 aa, Artificial Sequence
  Description of Artificial Sequence: Synthetic epitope
RKKITDSIEA

SEQ ID NO: 41386 - protein, 10 aa, Artificial Sequence
  Description of Artificial Sequence: Synthetic epitope
RKKLSKAVEK

SEQ ID NO: 41387 - protein, 10 aa, Artificial Sequence
  Description of Artificial Sequence: Synthetic epitope
RKKMAKLPKP

SEQ ID NO: 41388 - protein, 10 aa, Artificial Sequence
  Description of Artificial Sequence: Synthetic epitope
RKKMEKEAQR

SEQ ID NO: 41389 - protein, 10 aa, Artificial Sequence
  Description of Artificial Sequence: Synthetic epitope
RKKMTAADVS

SEQ ID NO: 41390 - protein, 10 aa, Artificial Sequence
  Description of Artificial Sequence: Synthetic epitope
RKKNEKREIK

SEQ ID NO: 41391 - protein, 10 aa, Artificial Sequence
  Description of Artificial Sequence: Synthetic epitope
RKKNLTLALE

SEQ ID NO: 41392 - protein, 10 aa, Artificial Sequence
  Description of Artificial Sequence: Synthetic epitope
RKKNQKYHER

SEQ ID NO: 41393 - protein, 10 aa, Artificial Sequence
  Description of Artificial Sequence: Synthetic epitope
RKKRALQKKD

SEQ ID NO: 41394 - protein, 10 aa, Artificial Sequence
  Description of Artificial Sequence: Synthetic epitope
RKKSALEPSS

SEQ ID NO: 41395 - protein, 10 aa, Artificial Sequence
  Description of Artificial Sequence: Synthetic epitope
RKKSENPTET

SEQ ID NO: 41396 - protein, 10 aa, Artificial Sequence
  Description of Artificial Sequence: Synthetic epitope
RKKTLLSESS

SEQ ID NO: 41397 - protein, 10 aa, Artificial Sequence
  Description of Artificial Sequence: Synthetic epitope
RKKTMKTGFD

SEQ ID NO: 41398 - protein, 10 aa, Artificial Sequence
  Description of Artificial Sequence: Synthetic epitope
RKLAGEGSSH

SEQ ID NO: 41399 - protein, 10 aa, Artificial Sequence
  Description of Artificial Sequence: Synthetic epitope
RKLAHQRETG

SEQ ID NO: 41400 - protein, 10 aa, Artificial Sequence
  Description of Artificial Sequence: Synthetic epitope
RKLASVLVSD

SEQ ID NO: 41401 - protein, 10 aa, Artificial Sequence
  Description of Artificial Sequence: Synthetic epitope
RKLAVASVTE

SEQ ID NO: 41402 - protein, 10 aa, Artificial Sequence
  Description of Artificial Sequence: Synthetic epitope
RKLDQVSQFG

SEQ ID NO: 41403 - protein, 10 aa, Artificial Sequence
  Description of Artificial Sequence: Synthetic epitope
RKLEEKASAS

SEQ ID NO: 41404 - protein, 10 aa, Artificial Sequence
  Description of Artificial Sequence: Synthetic epitope
RKLEKATQEL

SEQ ID NO: 41405 - protein, 10 aa, Artificial Sequence
  Description of Artificial Sequence: Synthetic epitope
RKLESATKSK

SEQ ID NO: 41406 - protein, 10 aa, Artificial Sequence
  Description of Artificial Sequence: Synthetic epitope
RKLEVSTEDV

SEQ ID NO: 41407 - protein, 10 aa, Artificial Sequence
  Description of Artificial Sequence: Synthetic epitope
RKLGGSQEDQ

SEQ ID NO: 41408 - protein, 10 aa, Artificial Sequence
  Description of Artificial Sequence: Synthetic epitope
RKLGHQLAEI

SEQ ID NO: 41409 - protein, 10 aa, Artificial Sequence
  Description of Artificial Sequence: Synthetic epitope
RKLILLKRED

SEQ ID NO: 41410 - protein, 10 aa, Artificial Sequence
  Description of Artificial Sequence: Synthetic epitope
RKLISATDIQ

SEQ ID NO: 41411 - protein, 10 aa, Artificial Sequence
  Description of Artificial Sequence: Synthetic epitope
RKLKASLQGD

SEQ ID NO: 41412 - protein, 10 aa, Artificial Sequence
  Description of Artificial Sequence: Synthetic epitope
RKLKDAYGKS

SEQ ID NO: 41413 - protein, 10 aa, Artificial Sequence
  Description of Artificial Sequence: Synthetic epitope
RKLLALMAQE

SEQ ID NO: 41414 - protein, 10 aa, Artificial Sequence
  Description of Artificial Sequence: Synthetic epitope
RKLLAQKYHD

SEQ ID NO: 41415 - protein, 10 aa, Artificial Sequence
  Description of Artificial Sequence: Synthetic epitope
RKLLGNVSLS

SEQ ID NO: 41416 - protein, 10 aa, Artificial Sequence
  Description of Artificial Sequence: Synthetic epitope
RKLNKATESF

SEQ ID NO: 41417 - protein, 10 aa, Artificial Sequence
  Description of Artificial Sequence: Synthetic epitope
RKLQTTSNAF

SEQ ID NO: 41418 - protein, 10 aa, Artificial Sequence
  Description of Artificial Sequence: Synthetic epitope
RKLRADVTTA

SEQ ID NO: 41419 - protein, 10 aa, Artificial Sequence
  Description of Artificial Sequence: Synthetic epitope
RKLRINAKET

SEQ ID NO: 41420 - protein, 10 aa, Artificial Sequence
  Description of Artificial Sequence: Synthetic epitope
RKLRSLKTSD

SEQ ID NO: 41421 - protein, 10 aa, Artificial Sequence
  Description of Artificial Sequence: Synthetic epitope
RKLSDVSYHQ

SEQ ID NO: 41422 - protein, 10 aa, Artificial Sequence
  Description of Artificial Sequence: Synthetic epitope
RKLSKKILSR

SEQ ID NO: 41423 - protein, 10 aa, Artificial Sequence
  Description of Artificial Sequence: Synthetic epitope
RKLSSETYSQ

SEQ ID NO: 41424 - protein, 10 aa, Artificial Sequence
  Description of Artificial Sequence: Synthetic epitope
RKLSSNAVSQ

SEQ ID NO: 41425 - protein, 10 aa, Artificial Sequence
  Description of Artificial Sequence: Synthetic epitope
RKLSTYIRLY

SEQ ID NO: 41426 - protein, 10 aa, Artificial Sequence
  Description of Artificial Sequence: Synthetic epitope
RKLTAERVEE

SEQ ID NO: 41427 - protein, 10 aa, Artificial Sequence
  Description of Artificial Sequence: Synthetic epitope
RKLVRSVTVV

SEQ ID NO: 41428 - protein, 10 aa, Artificial Sequence
  Description of Artificial Sequence: Synthetic epitope
RKLWQSGQQV

SEQ ID NO: 41429 - protein, 10 aa, Artificial Sequence
  Description of Artificial Sequence: Synthetic epitope
RKLYSGAQTD

SEQ ID NO: 41430 - protein, 10 aa, Artificial Sequence
  Description of Artificial Sequence: Synthetic epitope
RKMAPSETHG

SEQ ID NO: 41431 - protein, 10 aa, Artificial Sequence
  Description of Artificial Sequence: Synthetic epitope
RKMEIYRPHK

SEQ ID NO: 41432 - protein, 10 aa, Artificial Sequence
  Description of Artificial Sequence: Synthetic epitope
RKMFSFKVSR

SEQ ID NO: 41433 - protein, 10 aa, Artificial Sequence
  Description of Artificial Sequence: Synthetic epitope
RKMGSNLTAS

SEQ ID NO: 41434 - protein, 10 aa, Artificial Sequence
  Description of Artificial Sequence: Synthetic epitope
RKMQLKMQEE

SEQ ID NO: 41435 - protein, 10 aa, Artificial Sequence
  Description of Artificial Sequence: Synthetic epitope
RKNITDQQKF

SEQ ID NO: 41436 - protein, 10 aa, Artificial Sequence
  Description of Artificial Sequence: Synthetic epitope
RKNKHKASEP

SEQ ID NO: 41437 - protein, 10 aa, Artificial Sequence
  Description of Artificial Sequence: Synthetic epitope
RKNKQFIADN

SEQ ID NO: 41438 - protein, 10 aa, Artificial Sequence
  Description of Artificial Sequence: Synthetic epitope
RKNLTRATAR

SEQ ID NO: 41439 - protein, 10 aa, Artificial Sequence
  Description of Artificial Sequence: Synthetic epitope
RKNMTRVASL

SEQ ID NO: 41440 - protein, 10 aa, Artificial Sequence
  Description of Artificial Sequence: Synthetic epitope
RKNRMMTYAK

SEQ ID NO: 41441 - protein, 10 aa, Artificial Sequence
  Description of Artificial Sequence: Synthetic epitope
RKNVLLANSS

SEQ ID NO: 41442 - protein, 10 aa, Artificial Sequence
  Description of Artificial Sequence: Synthetic epitope
RKNVYSANQK

SEQ ID NO: 41443 - protein, 10 aa, Artificial Sequence
  Description of Artificial Sequence: Synthetic epitope
RKPKSQETPA

SEQ ID NO: 41444 - protein, 10 aa, Artificial Sequence
  Description of Artificial Sequence: Synthetic epitope
RKPLSDKLLR

SEQ ID NO: 41445 - protein, 10 aa, Artificial Sequence
  Description of Artificial Sequence: Synthetic epitope
RKPSKIVSTY

SEQ ID NO: 41446 - protein, 10 aa, Artificial Sequence
  Description of Artificial Sequence: Synthetic epitope
RKPTYSDKAQ

SEQ ID NO: 41447 - protein, 10 aa, Artificial Sequence
  Description of Artificial Sequence: Synthetic epitope
RKQAASIKVA

SEQ ID NO: 41448 - protein, 10 aa, Artificial Sequence
  Description of Artificial Sequence: Synthetic epitope
RKQARELLAA

SEQ ID NO: 41449 - protein, 10 aa, Artificial Sequence
  Description of Artificial Sequence: Synthetic epitope
RKQFAKVQPI

SEQ ID NO: 41450 - protein, 10 aa, Artificial Sequence
  Description of Artificial Sequence: Synthetic epitope
RKQGARVQNT

SEQ ID NO: 41451 - protein, 10 aa, Artificial Sequence
  Description of Artificial Sequence: Synthetic epitope
RKQGSATDNV

SEQ ID NO: 41452 - protein, 10 aa, Artificial Sequence
  Description of Artificial Sequence: Synthetic epitope
RKQHDVTQSK

SEQ ID NO: 41453 - protein, 10 aa, Artificial Sequence
  Description of Artificial Sequence: Synthetic epitope
RKQHMVNATP

SEQ ID NO: 41454 - protein, 10 aa, Artificial Sequence
  Description of Artificial Sequence: Synthetic epitope
RKQKAEKTKS

SEQ ID NO: 41455 - protein, 10 aa, Artificial Sequence
  Description of Artificial Sequence: Synthetic epitope
RKQKLRSATA

SEQ ID NO: 41456 - protein, 10 aa, Artificial Sequence
  Description of Artificial Sequence: Synthetic epitope
RKQLKKAKMA

SEQ ID NO: 41457 - protein, 10 aa, Artificial Sequence
  Description of Artificial Sequence: Synthetic epitope
RKQLSSTVFK

SEQ ID NO: 41458 - protein, 10 aa, Artificial Sequence
  Description of Artificial Sequence: Synthetic epitope
RKQMRGMPTF

SEQ ID NO: 41459 - protein, 10 aa, Artificial Sequence
  Description of Artificial Sequence: Synthetic epitope
RKQPGSSTSS

SEQ ID NO: 41460 - protein, 10 aa, Artificial Sequence
  Description of Artificial Sequence: Synthetic epitope
RKQPLSKKTK

SEQ ID NO: 41461 - protein, 10 aa, Artificial Sequence
  Description of Artificial Sequence: Synthetic epitope
RKQSHEQTST

SEQ ID NO: 41462 - protein, 10 aa, Artificial Sequence
  Description of Artificial Sequence: Synthetic epitope
RKQVENKNKY

SEQ ID NO: 41463 - protein, 10 aa, Artificial Sequence
  Description of Artificial Sequence: Synthetic epitope
RKQVKTVRFQ

SEQ ID NO: 41464 - protein, 10 aa, Artificial Sequence
  Description of Artificial Sequence: Synthetic epitope
RKQVSARDLF

SEQ ID NO: 41465 - protein, 10 aa, Artificial Sequence
  Description of Artificial Sequence: Synthetic epitope
RKQVSATKAE

SEQ ID NO: 41466 - protein, 10 aa, Artificial Sequence
  Description of Artificial Sequence: Synthetic epitope
RKQVSKVNGV

SEQ ID NO: 41467 - protein, 10 aa, Artificial Sequence
  Description of Artificial Sequence: Synthetic epitope
RKRAGKVVSE

SEQ ID NO: 41468 - protein, 10 aa, Artificial Sequence
  Description of Artificial Sequence: Synthetic epitope
RKRAKRSLKK

SEQ ID NO: 41469 - protein, 10 aa, Artificial Sequence
  Description of Artificial Sequence: Synthetic epitope
RKRELARAQD

SEQ ID NO: 41470 - protein, 10 aa, Artificial Sequence
  Description of Artificial Sequence: Synthetic epitope
RKRETVSIML

SEQ ID NO: 41471 - protein, 10 aa, Artificial Sequence
  Description of Artificial Sequence: Synthetic epitope
RKREVMTTEE

SEQ ID NO: 41472 - protein, 10 aa, Artificial Sequence
  Description of Artificial Sequence: Synthetic epitope
RKRFGMLDAT

SEQ ID NO: 41473 - protein, 10 aa, Artificial Sequence
  Description of Artificial Sequence: Synthetic epitope
RKRGMSILRE

SEQ ID NO: 41474 - protein, 10 aa, Artificial Sequence
  Description of Artificial Sequence: Synthetic epitope
RKRIESPFAK

SEQ ID NO: 41475 - protein, 10 aa, Artificial Sequence
  Description of Artificial Sequence: Synthetic epitope
RKRKKSRYKS

SEQ ID NO: 41476 - protein, 10 aa, Artificial Sequence
  Description of Artificial Sequence: Synthetic epitope
RKRKMDVSKI

SEQ ID NO: 41477 - protein, 10 aa, Artificial Sequence
  Description of Artificial Sequence: Synthetic epitope
RKRKQSILKK

SEQ ID NO: 41478 - protein, 10 aa, Artificial Sequence
  Description of Artificial Sequence: Synthetic epitope
RKRLATSSAS

SEQ ID NO: 41479 - protein, 10 aa, Artificial Sequence
  Description of Artificial Sequence: Synthetic epitope
RKRMSKKYSS

SEQ ID NO: 41480 - protein, 10 aa, Artificial Sequence
  Description of Artificial Sequence: Synthetic epitope
RKRPIQKVEM

SEQ ID NO: 41481 - protein, 10 aa, Artificial Sequence
  Description of Artificial Sequence: Synthetic epitope
RKRPRMAKEE

SEQ ID NO: 41482 - protein, 10 aa, Artificial Sequence
  Description of Artificial Sequence: Synthetic epitope
RKRQNSARNS

SEQ ID NO: 41483 - protein, 10 aa, Artificial Sequence
  Description of Artificial Sequence: Synthetic epitope
RKRSASADNL

SEQ ID NO: 41484 - protein, 10 aa, Artificial Sequence
  Description of Artificial Sequence: Synthetic epitope
RKRSISELVA

SEQ ID NO: 41485 - protein, 10 aa, Artificial Sequence
  Description of Artificial Sequence: Synthetic epitope
RKRVKSTYSS

SEQ ID NO: 41486 - protein, 10 aa, Artificial Sequence
  Description of Artificial Sequence: Synthetic epitope
RKRVNTKRSS

SEQ ID NO: 41487 - protein, 10 aa, Artificial Sequence
  Description of Artificial Sequence: Synthetic epitope
RKSAEKRKAM

SEQ ID NO: 41488 - protein, 10 aa, Artificial Sequence
  Description of Artificial Sequence: Synthetic epitope
RKSAPTDRRK

SEQ ID NO: 41489 - protein, 10 aa, Artificial Sequence
  Description of Artificial Sequence: Synthetic epitope
RKSARASVSR

SEQ ID NO: 41490 - protein, 10 aa, Artificial Sequence
  Description of Artificial Sequence: Synthetic epitope
RKSASREKRS

SEQ ID NO: 41491 - protein, 10 aa, Artificial Sequence
  Description of Artificial Sequence: Synthetic epitope
RKSDERLTAF

SEQ ID NO: 41492 - protein, 10 aa, Artificial Sequence
  Description of Artificial Sequence: Synthetic epitope
RKSEEFSTSH

SEQ ID NO: 41493 - protein, 10 aa, Artificial Sequence
  Description of Artificial Sequence: Synthetic epitope
RKSEPKIKKS

SEQ ID NO: 41494 - protein, 10 aa, Artificial Sequence
  Description of Artificial Sequence: Synthetic epitope
RKSEPKIKKS

SEQ ID NO: 41495 - protein, 10 aa, Artificial Sequence
  Description of Artificial Sequence: Synthetic epitope
RKSESVALKD

SEQ ID NO: 41496 - protein, 10 aa, Artificial Sequence
  Description of Artificial Sequence: Synthetic epitope
RKSEVSETKQ

SEQ ID NO: 41497 - protein, 10 aa, Artificial Sequence
  Description of Artificial Sequence: Synthetic epitope
RKSGKETSKL

SEQ ID NO: 41498 - protein, 10 aa, Artificial Sequence
  Description of Artificial Sequence: Synthetic epitope
RKSGMVSESQ

SEQ ID NO: 41499 - protein, 10 aa, Artificial Sequence
  Description of Artificial Sequence: Synthetic epitope
RKSIVDTVSI

SEQ ID NO: 41500 - protein, 10 aa, Artificial Sequence
  Description of Artificial Sequence: Synthetic epitope
RKSKSDDKTT

SEQ ID NO: 41501 - protein, 10 aa, Artificial Sequence
  Description of Artificial Sequence: Synthetic epitope
RKSKSKPDKQ

SEQ ID NO: 41502 - protein, 10 aa, Artificial Sequence
  Description of Artificial Sequence: Synthetic epitope
RKSLDEQANQ

SEQ ID NO: 41503 - protein, 10 aa, Artificial Sequence
  Description of Artificial Sequence: Synthetic epitope
RKSLHFVKRR

SEQ ID NO: 41504 - protein, 10 aa, Artificial Sequence
  Description of Artificial Sequence: Synthetic epitope
RKSLLTIRTE

SEQ ID NO: 41505 - protein, 10 aa, Artificial Sequence
  Description of Artificial Sequence: Synthetic epitope
RKSLQLASQR

SEQ ID NO: 41506 - protein, 10 aa, Artificial Sequence
  Description of Artificial Sequence: Synthetic epitope
RKSLSSKLTK

SEQ ID NO: 41507 - protein, 10 aa, Artificial Sequence
  Description of Artificial Sequence: Synthetic epitope
RKSMASSVSK

SEQ ID NO: 41508 - protein, 10 aa, Artificial Sequence
  Description of Artificial Sequence: Synthetic epitope
RKSNASRSKT

SEQ ID NO: 41509 - protein, 10 aa, Artificial Sequence
  Description of Artificial Sequence: Synthetic epitope
RKSNQQNLGT

SEQ ID NO: 41510 - protein, 10 aa, Artificial Sequence
  Description of Artificial Sequence: Synthetic epitope
RKSPSVSEEP

SEQ ID NO: 41511 - protein, 10 aa, Artificial Sequence
  Description of Artificial Sequence: Synthetic epitope
RKSQEKRSSF

SEQ ID NO: 41512 - protein, 10 aa, Artificial Sequence
  Description of Artificial Sequence: Synthetic epitope
RKSQVSIRYN

SEQ ID NO: 41513 - protein, 10 aa, Artificial Sequence
  Description of Artificial Sequence: Synthetic epitope
RKSREESTIA

SEQ ID NO: 41514 - protein, 10 aa, Artificial Sequence
  Description of Artificial Sequence: Synthetic epitope
RKSRQHQMQL

SEQ ID NO: 41515 - protein, 10 aa, Artificial Sequence
  Description of Artificial Sequence: Synthetic epitope
RKSRRADLGT

SEQ ID NO: 41516 - protein, 10 aa, Artificial Sequence
  Description of Artificial Sequence: Synthetic epitope
RKSSKEKVAV

SEQ ID NO: 41517 - protein, 10 aa, Artificial Sequence
  Description of Artificial Sequence: Synthetic epitope
RKSSLENEPS

SEQ ID NO: 41518 - protein, 10 aa, Artificial Sequence
  Description of Artificial Sequence: Synthetic epitope
RKSSMNQLQQ

SEQ ID NO: 41519 - protein, 10 aa, Artificial Sequence
  Description of Artificial Sequence: Synthetic epitope
RKSSTLEVKD

SEQ ID NO: 41520 - protein, 10 aa, Artificial Sequence
  Description of Artificial Sequence: Synthetic epitope
RKSSVTDSFS

SEQ ID NO: 41521 - protein, 10 aa, Artificial Sequence
  Description of Artificial Sequence: Synthetic epitope
RKSTAALEED

SEQ ID NO: 41522 - protein, 10 aa, Artificial Sequence
  Description of Artificial Sequence: Synthetic epitope
RKSTAALEED

SEQ ID NO: 41523 - protein, 10 aa, Artificial Sequence
  Description of Artificial Sequence: Synthetic epitope
RKSTQSDLAF

SEQ ID NO: 41524 - protein, 10 aa, Artificial Sequence
  Description of Artificial Sequence: Synthetic epitope
RKSTSLLGAL

SEQ ID NO: 41525 - protein, 10 aa, Artificial Sequence
  Description of Artificial Sequence: Synthetic epitope
RKSTTMDRRK

SEQ ID NO: 41526 - protein, 10 aa, Artificial Sequence
  Description of Artificial Sequence: Synthetic epitope
RKSWPQVVSR

SEQ ID NO: 41527 - protein, 10 aa, Artificial Sequence
  Description of Artificial Sequence: Synthetic epitope
RKTDKKLDDI

SEQ ID NO: 41528 - protein, 10 aa, Artificial Sequence
  Description of Artificial Sequence: Synthetic epitope
RKTERAKIQQ

SEQ ID NO: 41529 - protein, 10 aa, Artificial Sequence
  Description of Artificial Sequence: Synthetic epitope
RKTEYALWNY

SEQ ID NO: 41530 - protein, 10 aa, Artificial Sequence
  Description of Artificial Sequence: Synthetic epitope
RKTFEASTEK

SEQ ID NO: 41531 - protein, 10 aa, Artificial Sequence
  Description of Artificial Sequence: Synthetic epitope
RKTGLITPKA

SEQ ID NO: 41532 - protein, 10 aa, Artificial Sequence
  Description of Artificial Sequence: Synthetic epitope
RKTKKMMDLR

SEQ ID NO: 41533 - protein, 10 aa, Artificial Sequence
  Description of Artificial Sequence: Synthetic epitope
RKTKKSLELS

SEQ ID NO: 41534 - protein, 10 aa, Artificial Sequence
  Description of Artificial Sequence: Synthetic epitope
RKTKQNQILD

SEQ ID NO: 41535 - protein, 10 aa, Artificial Sequence
  Description of Artificial Sequence: Synthetic epitope
RKTKTEIVVE

SEQ ID NO: 41536 - protein, 10 aa, Artificial Sequence
  Description of Artificial Sequence: Synthetic epitope
RKTLDLALSI

SEQ ID NO: 41537 - protein, 10 aa, Artificial Sequence
  Description of Artificial Sequence: Synthetic epitope
RKTLEEQISE

SEQ ID NO: 41538 - protein, 10 aa, Artificial Sequence
  Description of Artificial Sequence: Synthetic epitope
RKTNSVSPIS

SEQ ID NO: 41539 - protein, 10 aa, Artificial Sequence
  Description of Artificial Sequence: Synthetic epitope
RKTPALKMSV

SEQ ID NO: 41540 - protein, 10 aa, Artificial Sequence
  Description of Artificial Sequence: Synthetic epitope
RKTRVEANSP

SEQ ID NO: 41541 - protein, 10 aa, Artificial Sequence
  Description of Artificial Sequence: Synthetic epitope
RKTSASSASA

SEQ ID NO: 41542 - protein, 10 aa, Artificial Sequence
  Description of Artificial Sequence: Synthetic epitope
RKTSDSTKMR

SEQ ID NO: 41543 - protein, 10 aa, Artificial Sequence
  Description of Artificial Sequence: Synthetic epitope
RKTSQAVKML

SEQ ID NO: 41544 - protein, 10 aa, Artificial Sequence
  Description of Artificial Sequence: Synthetic epitope
RKTSSKSSVR

SEQ ID NO: 41545 - protein, 10 aa, Artificial Sequence
  Description of Artificial Sequence: Synthetic epitope
RKTSVSQTSL

SEQ ID NO: 41546 - protein, 10 aa, Artificial Sequence
  Description of Artificial Sequence: Synthetic epitope
RKTTEVTGTG

SEQ ID NO: 41547 - protein, 10 aa, Artificial Sequence
  Description of Artificial Sequence: Synthetic epitope
RKTVIAQWRA

SEQ ID NO: 41548 - protein, 10 aa, Artificial Sequence
  Description of Artificial Sequence: Synthetic epitope
RKTVKAVIDR

SEQ ID NO: 41549 - protein, 10 aa, Artificial Sequence
  Description of Artificial Sequence: Synthetic epitope
RKTVTALKAG

SEQ ID NO: 41550 - protein, 10 aa, Artificial Sequence
  Description of Artificial Sequence: Synthetic epitope
RKTYAPPARA

SEQ ID NO: 41551 - protein, 10 aa, Artificial Sequence
  Description of Artificial Sequence: Synthetic epitope
RKTYSTEEYH

SEQ ID NO: 41552 - protein, 10 aa, Artificial Sequence
  Description of Artificial Sequence: Synthetic epitope
RKVAVSLSVH

SEQ ID NO: 41553 - protein, 10 aa, Artificial Sequence
  Description of Artificial Sequence: Synthetic epitope
RKVDASLTID

SEQ ID NO: 41554 - protein, 10 aa, Artificial Sequence
  Description of Artificial Sequence: Synthetic epitope
RKVKSVSPQG

SEQ ID NO: 41555 - protein, 10 aa, Artificial Sequence
  Description of Artificial Sequence: Synthetic epitope
RKVLALSSGS

SEQ ID NO: 41556 - protein, 10 aa, Artificial Sequence
  Description of Artificial Sequence: Synthetic epitope
RKVLKMWQFM

SEQ ID NO: 41557 - protein, 10 aa, Artificial Sequence
  Description of Artificial Sequence: Synthetic epitope
RKVNMEKSVT

SEQ ID NO: 41558 - protein, 10 aa, Artificial Sequence
  Description of Artificial Sequence: Synthetic epitope
RKVPAKEEAN

SEQ ID NO: 41559 - protein, 10 aa, Artificial Sequence
  Description of Artificial Sequence: Synthetic epitope
RKVQENSIQR

SEQ ID NO: 41560 - protein, 10 aa, Artificial Sequence
  Description of Artificial Sequence: Synthetic epitope
RKVQENSIQR

SEQ ID NO: 41561 - protein, 10 aa, Artificial Sequence
  Description of Artificial Sequence: Synthetic epitope
RKVRAKETRK

SEQ ID NO: 41562 - protein, 10 aa, Artificial Sequence
  Description of Artificial Sequence: Synthetic epitope
RKVSVSRMLS

SEQ ID NO: 41563 - protein, 10 aa, Artificial Sequence
  Description of Artificial Sequence: Synthetic epitope
RKVSVTLKEI

SEQ ID NO: 41564 - protein, 10 aa, Artificial Sequence
  Description of Artificial Sequence: Synthetic epitope
RKVTAAMGKK

SEQ ID NO: 41565 - protein, 10 aa, Artificial Sequence
  Description of Artificial Sequence: Synthetic epitope
RKVTQSAYAQ

SEQ ID NO: 41566 - protein, 10 aa, Artificial Sequence
  Description of Artificial Sequence: Synthetic epitope
RKVTSSETDE

SEQ ID NO: 41567 - protein, 10 aa, Artificial Sequence
  Description of Artificial Sequence: Synthetic epitope
RKVTVSARTN

SEQ ID NO: 41568 - protein, 10 aa, Artificial Sequence
  Description of Artificial Sequence: Synthetic epitope
RKVYLAKEKN

SEQ ID NO: 41569 - protein, 10 aa, Artificial Sequence
  Description of Artificial Sequence: Synthetic epitope
RKWITTETSI

SEQ ID NO: 41570 - protein, 10 aa, Artificial Sequence
  Description of Artificial Sequence: Synthetic epitope
RKWRRWHLQG

SEQ ID NO: 41571 - protein, 10 aa, Artificial Sequence
  Description of Artificial Sequence: Synthetic epitope
RKWSRSRSHS

SEQ ID NO: 41572 - protein, 10 aa, Artificial Sequence
  Description of Artificial Sequence: Synthetic epitope
RKYGTLTNRR

SEQ ID NO: 41573 - protein, 10 aa, Artificial Sequence
  Description of Artificial Sequence: Synthetic epitope
RKYRGSEIED

SEQ ID NO: 41574 - protein, 10 aa, Artificial Sequence
  Description of Artificial Sequence: Synthetic epitope
RKYSISSDNS

SEQ ID NO: 41575 - protein, 10 aa, Artificial Sequence
  Description of Artificial Sequence: Synthetic epitope
RKYSSMFEDD

SEQ ID NO: 41576 - protein, 10 aa, Artificial Sequence
  Description of Artificial Sequence: Synthetic epitope
RLAASASTQQ

SEQ ID NO: 41577 - protein, 10 aa, Artificial Sequence
  Description of Artificial Sequence: Synthetic epitope
RLAEELVAEE

SEQ ID NO: 41578 - protein, 10 aa, Artificial Sequence
  Description of Artificial Sequence: Synthetic epitope
RLAEESRTNA

SEQ ID NO: 41579 - protein, 10 aa, Artificial Sequence
  Description of Artificial Sequence: Synthetic epitope
RLAFEKMDKL

SEQ ID NO: 41580 - protein, 10 aa, Artificial Sequence
  Description of Artificial Sequence: Synthetic epitope
RLAHLLASAQ

SEQ ID NO: 41581 - protein, 10 aa, Artificial Sequence
  Description of Artificial Sequence: Synthetic epitope
RLALATEKAR

SEQ ID NO: 41582 - protein, 10 aa, Artificial Sequence
  Description of Artificial Sequence: Synthetic epitope
RLALKAQATN

SEQ ID NO: 41583 - protein, 10 aa, Artificial Sequence
  Description of Artificial Sequence: Synthetic epitope
RLALQTIPED

SEQ ID NO: 41584 - protein, 10 aa, Artificial Sequence
  Description of Artificial Sequence: Synthetic epitope
RLALQTIPED

SEQ ID NO: 41585 - protein, 10 aa, Artificial Sequence
  Description of Artificial Sequence: Synthetic epitope
RLALRINAQK

SEQ ID NO: 41586 - protein, 10 aa, Artificial Sequence
  Description of Artificial Sequence: Synthetic epitope
RLAMLTLEGN

SEQ ID NO: 41587 - protein, 10 aa, Artificial Sequence
  Description of Artificial Sequence: Synthetic epitope
RLANQLKKGG

SEQ ID NO: 41588 - protein, 10 aa, Artificial Sequence
  Description of Artificial Sequence: Synthetic epitope
RLANTITMIE

SEQ ID NO: 41589 - protein, 10 aa, Artificial Sequence
  Description of Artificial Sequence: Synthetic epitope
RLAPFELLET

SEQ ID NO: 41590 - protein, 10 aa, Artificial Sequence
  Description of Artificial Sequence: Synthetic epitope
RLAQLFMMSQ

SEQ ID NO: 41591 - protein, 10 aa, Artificial Sequence
  Description of Artificial Sequence: Synthetic epitope
RLARAASRLA

SEQ ID NO: 41592 - protein, 10 aa, Artificial Sequence
  Description of Artificial Sequence: Synthetic epitope
RLARDANSEN

SEQ ID NO: 41593 - protein, 10 aa, Artificial Sequence
  Description of Artificial Sequence: Synthetic epitope
RLARERTTEE

SEQ ID NO: 41594 - protein, 10 aa, Artificial Sequence
  Description of Artificial Sequence: Synthetic epitope
RLASAKQEME

SEQ ID NO: 41595 - protein, 10 aa, Artificial Sequence
  Description of Artificial Sequence: Synthetic epitope
RLASISVGPS

SEQ ID NO: 41596 - protein, 10 aa, Artificial Sequence
  Description of Artificial Sequence: Synthetic epitope
RLASSIRNPV

SEQ ID NO: 41597 - protein, 10 aa, Artificial Sequence
  Description of Artificial Sequence: Synthetic epitope
RLASTLVQVQ

SEQ ID NO: 41598 - protein, 10 aa, Artificial Sequence
  Description of Artificial Sequence: Synthetic epitope
RLATVVNDER

SEQ ID NO: 41599 - protein, 10 aa, Artificial Sequence
  Description of Artificial Sequence: Synthetic epitope
RLAVAARDFI

SEQ ID NO: 41600 - protein, 10 aa, Artificial Sequence
  Description of Artificial Sequence: Synthetic epitope
RLAVTNEERL

SEQ ID NO: 41601 - protein, 10 aa, Artificial Sequence
  Description of Artificial Sequence: Synthetic epitope
RLDADAAQRV

SEQ ID NO: 41602 - protein, 10 aa, Artificial Sequence
  Description of Artificial Sequence: Synthetic epitope
RLDESSMLEE

SEQ ID NO: 41603 - protein, 10 aa, Artificial Sequence
  Description of Artificial Sequence: Synthetic epitope
RLDESSMLEE

SEQ ID NO: 41604 - protein, 10 aa, Artificial Sequence
  Description of Artificial Sequence: Synthetic epitope
RLDKRSVVKH

SEQ ID NO: 41605 - protein, 10 aa, Artificial Sequence
  Description of Artificial Sequence: Synthetic epitope
RLDNRPRVAA

SEQ ID NO: 41606 - protein, 10 aa, Artificial Sequence
  Description of Artificial Sequence: Synthetic epitope
RLDSEASVHA

SEQ ID NO: 41607 - protein, 10 aa, Artificial Sequence
  Description of Artificial Sequence: Synthetic epitope
RLDTSSLKLS

SEQ ID NO: 41608 - protein, 10 aa, Artificial Sequence
  Description of Artificial Sequence: Synthetic epitope
RLDVASEFRK

SEQ ID NO: 41609 - protein, 10 aa, Artificial Sequence
  Description of Artificial Sequence: Synthetic epitope
RLDVQLASRS

SEQ ID NO: 41610 - protein, 10 aa, Artificial Sequence
  Description of Artificial Sequence: Synthetic epitope
RLEAKAEAQE

SEQ ID NO: 41611 - protein, 10 aa, Artificial Sequence
  Description of Artificial Sequence: Synthetic epitope
RLEATETQLP

SEQ ID NO: 41612 - protein, 10 aa, Artificial Sequence
  Description of Artificial Sequence: Synthetic epitope
RLEDNSETNA

SEQ ID NO: 41613 - protein, 10 aa, Artificial Sequence
  Description of Artificial Sequence: Synthetic epitope
RLEEYNSHQS

SEQ ID NO: 41614 - protein, 10 aa, Artificial Sequence
  Description of Artificial Sequence: Synthetic epitope
RLEILTSTGI

SEQ ID NO: 41615 - protein, 10 aa, Artificial Sequence
  Description of Artificial Sequence: Synthetic epitope
RLEKASQSRK

SEQ ID NO: 41616 - protein, 10 aa, Artificial Sequence
  Description of Artificial Sequence: Synthetic epitope
RLEKKTVTVE

SEQ ID NO: 41617 - protein, 10 aa, Artificial Sequence
  Description of Artificial Sequence: Synthetic epitope
RLELQQLNHQ

SEQ ID NO: 41618 - protein, 10 aa, Artificial Sequence
  Description of Artificial Sequence: Synthetic epitope
RLENEKVKKQ

SEQ ID NO: 41619 - protein, 10 aa, Artificial Sequence
  Description of Artificial Sequence: Synthetic epitope
RLENQQMMKR

SEQ ID NO: 41620 - protein, 10 aa, Artificial Sequence
  Description of Artificial Sequence: Synthetic epitope
RLEQVAFKEH

SEQ ID NO: 41621 - protein, 10 aa, Artificial Sequence
  Description of Artificial Sequence: Synthetic epitope
RLERALMETE

SEQ ID NO: 41622 - protein, 10 aa, Artificial Sequence
  Description of Artificial Sequence: Synthetic epitope
RLESAERLAE

SEQ ID NO: 41623 - protein, 10 aa, Artificial Sequence
  Description of Artificial Sequence: Synthetic epitope
RLESAKGLKE

SEQ ID NO: 41624 - protein, 10 aa, Artificial Sequence
  Description of Artificial Sequence: Synthetic epitope
RLESASYSSV

SEQ ID NO: 41625 - protein, 10 aa, Artificial Sequence
  Description of Artificial Sequence: Synthetic epitope
RLESTTRSPV

SEQ ID NO: 41626 - protein, 10 aa, Artificial Sequence
  Description of Artificial Sequence: Synthetic epitope
RLETSSESEA

SEQ ID NO: 41627 - protein, 10 aa, Artificial Sequence
  Description of Artificial Sequence: Synthetic epitope
RLFSSKSSGK

SEQ ID NO: 41628 - protein, 10 aa, Artificial Sequence
  Description of Artificial Sequence: Synthetic epitope
RLFSTAEAAV

SEQ ID NO: 41629 - protein, 10 aa, Artificial Sequence
  Description of Artificial Sequence: Synthetic epitope
RLFYTTSKLG

SEQ ID NO: 41630 - protein, 10 aa, Artificial Sequence
  Description of Artificial Sequence: Synthetic epitope
RLGAESSAEA

SEQ ID NO: 41631 - protein, 10 aa, Artificial Sequence
  Description of Artificial Sequence: Synthetic epitope
RLGATSVTRA

SEQ ID NO: 41632 - protein, 10 aa, Artificial Sequence
  Description of Artificial Sequence: Synthetic epitope
RLGDEAIGVR

SEQ ID NO: 41633 - protein, 10 aa, Artificial Sequence
  Description of Artificial Sequence: Synthetic epitope
RLGIGKVMEE

SEQ ID NO: 41634 - protein, 10 aa, Artificial Sequence
  Description of Artificial Sequence: Synthetic epitope
RLGQESAARK

SEQ ID NO: 41635 - protein, 10 aa, Artificial Sequence
  Description of Artificial Sequence: Synthetic epitope
RLGSKSVLST

SEQ ID NO: 41636 - protein, 10 aa, Artificial Sequence
  Description of Artificial Sequence: Synthetic epitope
RLGSSRSVTS

SEQ ID NO: 41637 - protein, 10 aa, Artificial Sequence
  Description of Artificial Sequence: Synthetic epitope
RLHKDKKEGR

SEQ ID NO: 41638 - protein, 10 aa, Artificial Sequence
  Description of Artificial Sequence: Synthetic epitope
RLHLAKDILM

SEQ ID NO: 41639 - protein, 10 aa, Artificial Sequence
  Description of Artificial Sequence: Synthetic epitope
RLHNMKLSIS

SEQ ID NO: 41640 - protein, 10 aa, Artificial Sequence
  Description of Artificial Sequence: Synthetic epitope
RLHQRSVSKE

SEQ ID NO: 41641 - protein, 10 aa, Artificial Sequence
  Description of Artificial Sequence: Synthetic epitope
RLIANLAEHI

SEQ ID NO: 41642 - protein, 10 aa, Artificial Sequence
  Description of Artificial Sequence: Synthetic epitope
RLIIVKEVYY

SEQ ID NO: 41643 - protein, 10 aa, Artificial Sequence
  Description of Artificial Sequence: Synthetic epitope
RLIQLSVANN

SEQ ID NO: 41644 - protein, 10 aa, Artificial Sequence
  Description of Artificial Sequence: Synthetic epitope
RLITSSLASA

SEQ ID NO: 41645 - protein, 10 aa, Artificial Sequence
  Description of Artificial Sequence: Synthetic epitope
RLKAEKKVAE

SEQ ID NO: 41646 - protein, 10 aa, Artificial Sequence
  Description of Artificial Sequence: Synthetic epitope
RLKAFMITRH

SEQ ID NO: 41647 - protein, 10 aa, Artificial Sequence
  Description of Artificial Sequence: Synthetic epitope
RLKAMDQEIT

SEQ ID NO: 41648 - protein, 10 aa, Artificial Sequence
  Description of Artificial Sequence: Synthetic epitope
RLKEIQMSEY

SEQ ID NO: 41649 - protein, 10 aa, Artificial Sequence
  Description of Artificial Sequence: Synthetic epitope
RLKLAASEDH

SEQ ID NO: 41650 - protein, 10 aa, Artificial Sequence
  Description of Artificial Sequence: Synthetic epitope
RLKLDKDRKK

SEQ ID NO: 41651 - protein, 10 aa, Artificial Sequence
  Description of Artificial Sequence: Synthetic epitope
RLKLDKDRKK

SEQ ID NO: 41652 - protein, 10 aa, Artificial Sequence
  Description of Artificial Sequence: Synthetic epitope
RLKLFLVKDP

SEQ ID NO: 41653 - protein, 10 aa, Artificial Sequence
  Description of Artificial Sequence: Synthetic epitope
RLKQSKIMGS

SEQ ID NO: 41654 - protein, 10 aa, Artificial Sequence
  Description of Artificial Sequence: Synthetic epitope
RLKQVLREKE

SEQ ID NO: 41655 - protein, 10 aa, Artificial Sequence
  Description of Artificial Sequence: Synthetic epitope
RLKRAKMDKS

SEQ ID NO: 41656 - protein, 10 aa, Artificial Sequence
  Description of Artificial Sequence: Synthetic epitope
RLKSFTSMDS

SEQ ID NO: 41657 - protein, 10 aa, Artificial Sequence
  Description of Artificial Sequence: Synthetic epitope
RLKSSNFLPK

SEQ ID NO: 41658 - protein, 10 aa, Artificial Sequence
  Description of Artificial Sequence: Synthetic epitope
RLLAEKLKEE

SEQ ID NO: 41659 - protein, 10 aa, Artificial Sequence
  Description of Artificial Sequence: Synthetic epitope
RLLAEQQNKK

SEQ ID NO: 41660 - protein, 10 aa, Artificial Sequence
  Description of Artificial Sequence: Synthetic epitope
RLLAQEEAAM

SEQ ID NO: 41661 - protein, 10 aa, Artificial Sequence
  Description of Artificial Sequence: Synthetic epitope
RLLATLKNVS

SEQ ID NO: 41662 - protein, 10 aa, Artificial Sequence
  Description of Artificial Sequence: Synthetic epitope
RLLDKATSQL

SEQ ID NO: 41663 - protein, 10 aa, Artificial Sequence
  Description of Artificial Sequence: Synthetic epitope
RLLDSVSRLQ

SEQ ID NO: 41664 - protein, 10 aa, Artificial Sequence
  Description of Artificial Sequence: Synthetic epitope
RLLEARSSRP

SEQ ID NO: 41665 - protein, 10 aa, Artificial Sequence
  Description of Artificial Sequence: Synthetic epitope
RLLEDRSFKE

SEQ ID NO: 41666 - protein, 10 aa, Artificial Sequence
  Description of Artificial Sequence: Synthetic epitope
RLLEMAEAQN

SEQ ID NO: 41667 - protein, 10 aa, Artificial Sequence
  Description of Artificial Sequence: Synthetic epitope
RLLERQAIGD

SEQ ID NO: 41668 - protein, 10 aa, Artificial Sequence
  Description of Artificial Sequence: Synthetic epitope
RLLESISNSS

SEQ ID NO: 41669 - protein, 10 aa, Artificial Sequence
  Description of Artificial Sequence: Synthetic epitope
RLLESTLRSS

SEQ ID NO: 41670 - protein, 10 aa, Artificial Sequence
  Description of Artificial Sequence: Synthetic epitope
RLLHAAQSSR

SEQ ID NO: 41671 - protein, 10 aa, Artificial Sequence
  Description of Artificial Sequence: Synthetic epitope
RLLILILKNM

SEQ ID NO: 41672 - protein, 10 aa, Artificial Sequence
  Description of Artificial Sequence: Synthetic epitope
RLLKKSSMQT

SEQ ID NO: 41673 - protein, 10 aa, Artificial Sequence
  Description of Artificial Sequence: Synthetic epitope
RLLNLSLNSE

SEQ ID NO: 41674 - protein, 10 aa, Artificial Sequence
  Description of Artificial Sequence: Synthetic epitope
RLLQETSALH

SEQ ID NO: 41675 - protein, 10 aa, Artificial Sequence
  Description of Artificial Sequence: Synthetic epitope
RLLQQTVRSS

SEQ ID NO: 41676 - protein, 10 aa, Artificial Sequence
  Description of Artificial Sequence: Synthetic epitope
RLLQSLASGG

SEQ ID NO: 41677 - protein, 10 aa, Artificial Sequence
  Description of Artificial Sequence: Synthetic epitope
RLLQVEISFH

SEQ ID NO: 41678 - protein, 10 aa, Artificial Sequence
  Description of Artificial Sequence: Synthetic epitope
RLLREKLIPS

SEQ ID NO: 41679 - protein, 10 aa, Artificial Sequence
  Description of Artificial Sequence: Synthetic epitope
RLLRKATALP

SEQ ID NO: 41680 - protein, 10 aa, Artificial Sequence
  Description of Artificial Sequence: Synthetic epitope
RLLRQKREAA

SEQ ID NO: 41681 - protein, 10 aa, Artificial Sequence
  Description of Artificial Sequence: Synthetic epitope
RLLSARRLAL

SEQ ID NO: 41682 - protein, 10 aa, Artificial Sequence
  Description of Artificial Sequence: Synthetic epitope
RLLTAQEQPV

SEQ ID NO: 41683 - protein, 10 aa, Artificial Sequence
  Description of Artificial Sequence: Synthetic epitope
RLLTHYVKVQ

SEQ ID NO: 41684 - protein, 10 aa, Artificial Sequence
  Description of Artificial Sequence: Synthetic epitope
RLLTRLAVSP

SEQ ID NO: 41685 - protein, 10 aa, Artificial Sequence
  Description of Artificial Sequence: Synthetic epitope
RLLTRLAVSP

SEQ ID NO: 41686 - protein, 10 aa, Artificial Sequence
  Description of Artificial Sequence: Synthetic epitope
RLLVQTSVQA

SEQ ID NO: 41687 - protein, 10 aa, Artificial Sequence
  Description of Artificial Sequence: Synthetic epitope
RLLVTQANRL

SEQ ID NO: 41688 - protein, 10 aa, Artificial Sequence
  Description of Artificial Sequence: Synthetic epitope
RLLVTTSTSL

SEQ ID NO: 41689 - protein, 10 aa, Artificial Sequence
  Description of Artificial Sequence: Synthetic epitope
RLMATQMTAA

SEQ ID NO: 41690 - protein, 10 aa, Artificial Sequence
  Description of Artificial Sequence: Synthetic epitope
RLMKEAAELK

SEQ ID NO: 41691 - protein, 10 aa, Artificial Sequence
  Description of Artificial Sequence: Synthetic epitope
RLMKKVQITK

SEQ ID NO: 41692 - protein, 10 aa, Artificial Sequence
  Description of Artificial Sequence: Synthetic epitope
RLMLQTETIQ

SEQ ID NO: 41693 - protein, 10 aa, Artificial Sequence
  Description of Artificial Sequence: Synthetic epitope
RLMNLMRDVE

SEQ ID NO: 41694 - protein, 10 aa, Artificial Sequence
  Description of Artificial Sequence: Synthetic epitope
RLMPKVVRVL

SEQ ID NO: 41695 - protein, 10 aa, Artificial Sequence
  Description of Artificial Sequence: Synthetic epitope
RLMRQSRRST

SEQ ID NO: 41696 - protein, 10 aa, Artificial Sequence
  Description of Artificial Sequence: Synthetic epitope
RLNHQKNLVE

SEQ ID NO: 41697 - protein, 10 aa, Artificial Sequence
  Description of Artificial Sequence: Synthetic epitope
RLNLESSNSK

SEQ ID NO: 41698 - protein, 10 aa, Artificial Sequence
  Description of Artificial Sequence: Synthetic epitope
RLNLQRASTT

SEQ ID NO: 41699 - protein, 10 aa, Artificial Sequence
  Description of Artificial Sequence: Synthetic epitope
RLNQVTADTL

SEQ ID NO: 41700 - protein, 10 aa, Artificial Sequence
  Description of Artificial Sequence: Synthetic epitope
RLNRKPIEST

SEQ ID NO: 41701 - protein, 10 aa, Artificial Sequence
  Description of Artificial Sequence: Synthetic epitope
RLNSASQRSS

SEQ ID NO: 41702 - protein, 10 aa, Artificial Sequence
  Description of Artificial Sequence: Synthetic epitope
RLNSLLFRWS

SEQ ID NO: 41703 - protein, 10 aa, Artificial Sequence
  Description of Artificial Sequence: Synthetic epitope
RLNSNTQGEM

SEQ ID NO: 41704 - protein, 10 aa, Artificial Sequence
  Description of Artificial Sequence: Synthetic epitope
RLNSSEAQAP

SEQ ID NO: 41705 - protein, 10 aa, Artificial Sequence
  Description of Artificial Sequence: Synthetic epitope
RLNTLAAKKG

SEQ ID NO: 41706 - protein, 10 aa, Artificial Sequence
  Description of Artificial Sequence: Synthetic epitope
RLNYQSSVQG

SEQ ID NO: 41707 - protein, 10 aa, Artificial Sequence
  Description of Artificial Sequence: Synthetic epitope
RLPAVASKRY

SEQ ID NO: 41708 - protein, 10 aa, Artificial Sequence
  Description of Artificial Sequence: Synthetic epitope
RLPAVSVGLE

SEQ ID NO: 41709 - protein, 10 aa, Artificial Sequence
  Description of Artificial Sequence: Synthetic epitope
RLPIKVLKML

SEQ ID NO: 41710 - protein, 10 aa, Artificial Sequence
  Description of Artificial Sequence: Synthetic epitope
RLPIRRSSTR

SEQ ID NO: 41711 - protein, 10 aa, Artificial Sequence
  Description of Artificial Sequence: Synthetic epitope
RLPLAVSLKP

SEQ ID NO: 41712 - protein, 10 aa, Artificial Sequence
  Description of Artificial Sequence: Synthetic epitope
RLPLMAEVSE

SEQ ID NO: 41713 - protein, 10 aa, Artificial Sequence
  Description of Artificial Sequence: Synthetic epitope
RLPRTSALKS

SEQ ID NO: 41714 - protein, 10 aa, Artificial Sequence
  Description of Artificial Sequence: Synthetic epitope
RLPSNVDQSA

SEQ ID NO: 41715 - protein, 10 aa, Artificial Sequence
  Description of Artificial Sequence: Synthetic epitope
RLPTGAQQHS

SEQ ID NO: 41716 - protein, 10 aa, Artificial Sequence
  Description of Artificial Sequence: Synthetic epitope
RLQAQNIQQR

SEQ ID NO: 41717 - protein, 10 aa, Artificial Sequence
  Description of Artificial Sequence: Synthetic epitope
RLQAQSLSTV

SEQ ID NO: 41718 - protein, 10 aa, Artificial Sequence
  Description of Artificial Sequence: Synthetic epitope
RLQDVVSERA

SEQ ID NO: 41719 - protein, 10 aa, Artificial Sequence
  Description of Artificial Sequence: Synthetic epitope
RLQEISVVSA

SEQ ID NO: 41720 - protein, 10 aa, Artificial Sequence
  Description of Artificial Sequence: Synthetic epitope
RLQEQNAIDM

SEQ ID NO: 41721 - protein, 10 aa, Artificial Sequence
  Description of Artificial Sequence: Synthetic epitope
RLQGGLTARR

SEQ ID NO: 41722 - protein, 10 aa, Artificial Sequence
  Description of Artificial Sequence: Synthetic epitope
RLQGRSEQRR

SEQ ID NO: 41723 - protein, 10 aa, Artificial Sequence
  Description of Artificial Sequence: Synthetic epitope
RLQISELSGK

SEQ ID NO: 41724 - protein, 10 aa, Artificial Sequence
  Description of Artificial Sequence: Synthetic epitope
RLQQDRLNSE

SEQ ID NO: 41725 - protein, 10 aa, Artificial Sequence
  Description of Artificial Sequence: Synthetic epitope
RLQRAVAAVA

SEQ ID NO: 41726 - protein, 10 aa, Artificial Sequence
  Description of Artificial Sequence: Synthetic epitope
RLQSAMTEGG

SEQ ID NO: 41727 - protein, 10 aa, Artificial Sequence
  Description of Artificial Sequence: Synthetic epitope
RLQSQVISEL

SEQ ID NO: 41728 - protein, 10 aa, Artificial Sequence
  Description of Artificial Sequence: Synthetic epitope
RLQTSQHNSG

SEQ ID NO: 41729 - protein, 10 aa, Artificial Sequence
  Description of Artificial Sequence: Synthetic epitope
RLQVQLAPVM

SEQ ID NO: 41730 - protein, 10 aa, Artificial Sequence
  Description of Artificial Sequence: Synthetic epitope
RLRAQNIPGD

SEQ ID NO: 41731 - protein, 10 aa, Artificial Sequence
  Description of Artificial Sequence: Synthetic epitope
RLRERTRLNQ

SEQ ID NO: 41732 - protein, 10 aa, Artificial Sequence
  Description of Artificial Sequence: Synthetic epitope
RLRFESSMEE

SEQ ID NO: 41733 - protein, 10 aa, Artificial Sequence
  Description of Artificial Sequence: Synthetic epitope
RLRGSSMASS

SEQ ID NO: 41734 - protein, 10 aa, Artificial Sequence
  Description of Artificial Sequence: Synthetic epitope
RLRLKSTSRE

SEQ ID NO: 41735 - protein, 10 aa, Artificial Sequence
  Description of Artificial Sequence: Synthetic epitope
RLRMVETLSN

SEQ ID NO: 41736 - protein, 10 aa, Artificial Sequence
  Description of Artificial Sequence: Synthetic epitope
RLRRFAALGA

SEQ ID NO: 41737 - protein, 10 aa, Artificial Sequence
  Description of Artificial Sequence: Synthetic epitope
RLRTMVEKSE

SEQ ID NO: 41738 - protein, 10 aa, Artificial Sequence
  Description of Artificial Sequence: Synthetic epitope
RLSAKLAREK

SEQ ID NO: 41739 - protein, 10 aa, Artificial Sequence
  Description of Artificial Sequence: Synthetic epitope
RLSDMSISTS

SEQ ID NO: 41740 - protein, 10 aa, Artificial Sequence
  Description of Artificial Sequence: Synthetic epitope
RLSENASKAV

SEQ ID NO: 41741 - protein, 10 aa, Artificial Sequence
  Description of Artificial Sequence: Synthetic epitope
RLSENSKEED

SEQ ID NO: 41742 - protein, 10 aa, Artificial Sequence
  Description of Artificial Sequence: Synthetic epitope
RLSKAEILGN

SEQ ID NO: 41743 - protein, 10 aa, Artificial Sequence
  Description of Artificial Sequence: Synthetic epitope
RLSLFSKSSD

SEQ ID NO: 41744 - protein, 10 aa, Artificial Sequence
  Description of Artificial Sequence: Synthetic epitope
RLSLREKAVA

SEQ ID NO: 41745 - protein, 10 aa, Artificial Sequence
  Description of Artificial Sequence: Synthetic epitope
RLSLVRLGEP

SEQ ID NO: 41746 - protein, 10 aa, Artificial Sequence
  Description of Artificial Sequence: Synthetic epitope
RLSNKLKGST

SEQ ID NO: 41747 - protein, 10 aa, Artificial Sequence
  Description of Artificial Sequence: Synthetic epitope
RLSQQDRSLM

SEQ ID NO: 41748 - protein, 10 aa, Artificial Sequence
  Description of Artificial Sequence: Synthetic epitope
RLSRLKRASS

SEQ ID NO: 41749 - protein, 10 aa, Artificial Sequence
  Description of Artificial Sequence: Synthetic epitope
RLSSDADLVM

SEQ ID NO: 41750 - protein, 10 aa, Artificial Sequence
  Description of Artificial Sequence: Synthetic epitope
RLSSESARQL

SEQ ID NO: 41751 - protein, 10 aa, Artificial Sequence
  Description of Artificial Sequence: Synthetic epitope
RLSSESSNYT

SEQ ID NO: 41752 - protein, 10 aa, Artificial Sequence
  Description of Artificial Sequence: Synthetic epitope
RLSSIQLGQS

SEQ ID NO: 41753 - protein, 10 aa, Artificial Sequence
  Description of Artificial Sequence: Synthetic epitope
RLSSVNLESA

SEQ ID NO: 41754 - protein, 10 aa, Artificial Sequence
  Description of Artificial Sequence: Synthetic epitope
RLSTVHEPSS

SEQ ID NO: 41755 - protein, 10 aa, Artificial Sequence
  Description of Artificial Sequence: Synthetic epitope
RLSVEEQKWP

SEQ ID NO: 41756 - protein, 10 aa, Artificial Sequence
  Description of Artificial Sequence: Synthetic epitope
RLSVLLVQNR

SEQ ID NO: 41757 - protein, 10 aa, Artificial Sequence
  Description of Artificial Sequence: Synthetic epitope
RLTADVTKKT

SEQ ID NO: 41758 - protein, 10 aa, Artificial Sequence
  Description of Artificial Sequence: Synthetic epitope
RLTARSISTP

SEQ ID NO: 41759 - protein, 10 aa, Artificial Sequence
  Description of Artificial Sequence: Synthetic epitope
RLTDLDKAQL

SEQ ID NO: 41760 - protein, 10 aa, Artificial Sequence
  Description of Artificial Sequence: Synthetic epitope
RLTDSSPSST

SEQ ID NO: 41761 - protein, 10 aa, Artificial Sequence
  Description of Artificial Sequence: Synthetic epitope
RLTEADYLSS

SEQ ID NO: 41762 - protein, 10 aa, Artificial Sequence
  Description of Artificial Sequence: Synthetic epitope
RLTEAKLREE

SEQ ID NO: 41763 - protein, 10 aa, Artificial Sequence
  Description of Artificial Sequence: Synthetic epitope
RLTGSASTAK

SEQ ID NO: 41764 - protein, 10 aa, Artificial Sequence
  Description of Artificial Sequence: Synthetic epitope
RLTKEEPLSQ

SEQ ID NO: 41765 - protein, 10 aa, Artificial Sequence
  Description of Artificial Sequence: Synthetic epitope
RLTKPSKSAA

SEQ ID NO: 41766 - protein, 10 aa, Artificial Sequence
  Description of Artificial Sequence: Synthetic epitope
RLTLQTTSDG

SEQ ID NO: 41767 - protein, 10 aa, Artificial Sequence
  Description of Artificial Sequence: Synthetic epitope
RLTLVVKVST

SEQ ID NO: 41768 - protein, 10 aa, Artificial Sequence
  Description of Artificial Sequence: Synthetic epitope
RLTQNSQSVL

SEQ ID NO: 41769 - protein, 10 aa, Artificial Sequence
  Description of Artificial Sequence: Synthetic epitope
RLTQQRKIGK

SEQ ID NO: 41770 - protein, 10 aa, Artificial Sequence
  Description of Artificial Sequence: Synthetic epitope
RLTSEASREA

SEQ ID NO: 41771 - protein, 10 aa, Artificial Sequence
  Description of Artificial Sequence: Synthetic epitope
RLTTSAKDGN

SEQ ID NO: 41772 - protein, 10 aa, Artificial Sequence
  Description of Artificial Sequence: Synthetic epitope
RLTVSSLQES

SEQ ID NO: 41773 - protein, 10 aa, Artificial Sequence
  Description of Artificial Sequence: Synthetic epitope
RLTVTLTQHV

SEQ ID NO: 41774 - protein, 10 aa, Artificial Sequence
  Description of Artificial Sequence: Synthetic epitope
RLVEALEENE

SEQ ID NO: 41775 - protein, 10 aa, Artificial Sequence
  Description of Artificial Sequence: Synthetic epitope
RLVEMSEKKA

SEQ ID NO: 41776 - protein, 10 aa, Artificial Sequence
  Description of Artificial Sequence: Synthetic epitope
RLVGQLKRVP

SEQ ID NO: 41777 - protein, 10 aa, Artificial Sequence
  Description of Artificial Sequence: Synthetic epitope
RLVITASQSL

SEQ ID NO: 41778 - protein, 10 aa, Artificial Sequence
  Description of Artificial Sequence: Synthetic epitope
RLVKQKLKKA

SEQ ID NO: 41779 - protein, 10 aa, Artificial Sequence
  Description of Artificial Sequence: Synthetic epitope
RLVLDSVKLE

SEQ ID NO: 41780 - protein, 10 aa, Artificial Sequence
  Description of Artificial Sequence: Synthetic epitope
RLVLEVLQKQ

SEQ ID NO: 41781 - protein, 10 aa, Artificial Sequence
  Description of Artificial Sequence: Synthetic epitope
RLVMSIRRSA

SEQ ID NO: 41782 - protein, 10 aa, Artificial Sequence
  Description of Artificial Sequence: Synthetic epitope
RLVNEQKELA

SEQ ID NO: 41783 - protein, 10 aa, Artificial Sequence
  Description of Artificial Sequence: Synthetic epitope
RLVQGSILKK

SEQ ID NO: 41784 - protein, 10 aa, Artificial Sequence
  Description of Artificial Sequence: Synthetic epitope
RLVQSLSKAD

SEQ ID NO: 41785 - protein, 10 aa, Artificial Sequence
  Description of Artificial Sequence: Synthetic epitope
RLVQSVVLEP

SEQ ID NO: 41786 - protein, 10 aa, Artificial Sequence
  Description of Artificial Sequence: Synthetic epitope
RLVRSRSSDI

SEQ ID NO: 41787 - protein, 10 aa, Artificial Sequence
  Description of Artificial Sequence: Synthetic epitope
RLVSQFIQNR

SEQ ID NO: 41788 - protein, 10 aa, Artificial Sequence
  Description of Artificial Sequence: Synthetic epitope
RLVSTLISKA

SEQ ID NO: 41789 - protein, 10 aa, Artificial Sequence
  Description of Artificial Sequence: Synthetic epitope
RLVTSTAYTS

SEQ ID NO: 41790 - protein, 10 aa, Artificial Sequence
  Description of Artificial Sequence: Synthetic epitope
RLVVASFNIH

SEQ ID NO: 41791 - protein, 10 aa, Artificial Sequence
  Description of Artificial Sequence: Synthetic epitope
RLVVKSLKEK

SEQ ID NO: 41792 - protein, 10 aa, Artificial Sequence
  Description of Artificial Sequence: Synthetic epitope
RLVVQSAKID

SEQ ID NO: 41793 - protein, 10 aa, Artificial Sequence
  Description of Artificial Sequence: Synthetic epitope
RLWIRTLRLN

SEQ ID NO: 41794 - protein, 10 aa, Artificial Sequence
  Description of Artificial Sequence: Synthetic epitope
RLWQMTKIKM

SEQ ID NO: 41795 - protein, 10 aa, Artificial Sequence
  Description of Artificial Sequence: Synthetic epitope
RLWTQARQMG

SEQ ID NO: 41796 - protein, 10 aa, Artificial Sequence
  Description of Artificial Sequence: Synthetic epitope
RLYHGTIVNQ

SEQ ID NO: 41797 - protein, 10 aa, Artificial Sequence
  Description of Artificial Sequence: Synthetic epitope
RMAATQIDSL

SEQ ID NO: 41798 - protein, 10 aa, Artificial Sequence
  Description of Artificial Sequence: Synthetic epitope
RMAGRTTAAP

SEQ ID NO: 41799 - protein, 10 aa, Artificial Sequence
  Description of Artificial Sequence: Synthetic epitope
RMAHQQVWAA

SEQ ID NO: 41800 - protein, 10 aa, Artificial Sequence
  Description of Artificial Sequence: Synthetic epitope
RMAKLIAQDL

SEQ ID NO: 41801 - protein, 10 aa, Artificial Sequence
  Description of Artificial Sequence: Synthetic epitope
RMANVALREE

SEQ ID NO: 41802 - protein, 10 aa, Artificial Sequence
  Description of Artificial Sequence: Synthetic epitope
RMARHSANTS

SEQ ID NO: 41803 - protein, 10 aa, Artificial Sequence
  Description of Artificial Sequence: Synthetic epitope
RMATAEAQSL

SEQ ID NO: 41804 - protein, 10 aa, Artificial Sequence
  Description of Artificial Sequence: Synthetic epitope
RMEILSTLLR

SEQ ID NO: 41805 - protein, 10 aa, Artificial Sequence
  Description of Artificial Sequence: Synthetic epitope
RMEMRRYEED

SEQ ID NO: 41806 - protein, 10 aa, Artificial Sequence
  Description of Artificial Sequence: Synthetic epitope
RMERQSTSRV

SEQ ID NO: 41807 - protein, 10 aa, Artificial Sequence
  Description of Artificial Sequence: Synthetic epitope
RMESQLSASK

SEQ ID NO: 41808 - protein, 10 aa, Artificial Sequence
  Description of Artificial Sequence: Synthetic epitope
RMESQLSASK

SEQ ID NO: 41809 - protein, 10 aa, Artificial Sequence
  Description of Artificial Sequence: Synthetic epitope
RMEVGQQAVE

SEQ ID NO: 41810 - protein, 10 aa, Artificial Sequence
  Description of Artificial Sequence: Synthetic epitope
RMFKVYWELT

SEQ ID NO: 41811 - protein, 10 aa, Artificial Sequence
  Description of Artificial Sequence: Synthetic epitope
RMGSGIQYGD

SEQ ID NO: 41812 - protein, 10 aa, Artificial Sequence
  Description of Artificial Sequence: Synthetic epitope
RMIAAESSTE

SEQ ID NO: 41813 - protein, 10 aa, Artificial Sequence
  Description of Artificial Sequence: Synthetic epitope
RMIESRQKRK

SEQ ID NO: 41814 - protein, 10 aa, Artificial Sequence
  Description of Artificial Sequence: Synthetic epitope
RMIHNHRKSM

SEQ ID NO: 41815 - protein, 10 aa, Artificial Sequence
  Description of Artificial Sequence: Synthetic epitope
RMIIEALDVP

SEQ ID NO: 41816 - protein, 10 aa, Artificial Sequence
  Description of Artificial Sequence: Synthetic epitope
RMIMALVSDS

SEQ ID NO: 41817 - protein, 10 aa, Artificial Sequence
  Description of Artificial Sequence: Synthetic epitope
RMIQAAVQQR

SEQ ID NO: 41818 - protein, 10 aa, Artificial Sequence
  Description of Artificial Sequence: Synthetic epitope
RMIRSAQQVV

SEQ ID NO: 41819 - protein, 10 aa, Artificial Sequence
  Description of Artificial Sequence: Synthetic epitope
RMIVSSTSAN

SEQ ID NO: 41820 - protein, 10 aa, Artificial Sequence
  Description of Artificial Sequence: Synthetic epitope
RMKNSQILSQ

SEQ ID NO: 41821 - protein, 10 aa, Artificial Sequence
  Description of Artificial Sequence: Synthetic epitope
RMKSDVKMSL

SEQ ID NO: 41822 - protein, 10 aa, Artificial Sequence
  Description of Artificial Sequence: Synthetic epitope
RMKTSTNENT

SEQ ID NO: 41823 - protein, 10 aa, Artificial Sequence
  Description of Artificial Sequence: Synthetic epitope
RMKVVKSRKV

SEQ ID NO: 41824 - protein, 10 aa, Artificial Sequence
  Description of Artificial Sequence: Synthetic epitope
RMLENALQLG

SEQ ID NO: 41825 - protein, 10 aa, Artificial Sequence
  Description of Artificial Sequence: Synthetic epitope
RMLETILRML

SEQ ID NO: 41826 - protein, 10 aa, Artificial Sequence
  Description of Artificial Sequence: Synthetic epitope
RMLIKVADRE

SEQ ID NO: 41827 - protein, 10 aa, Artificial Sequence
  Description of Artificial Sequence: Synthetic epitope
RMLKVARLLE

SEQ ID NO: 41828 - protein, 10 aa, Artificial Sequence
  Description of Artificial Sequence: Synthetic epitope
RMLLQATDDV

SEQ ID NO: 41829 - protein, 10 aa, Artificial Sequence
  Description of Artificial Sequence: Synthetic epitope
RMLQLAISEG

SEQ ID NO: 41830 - protein, 10 aa, Artificial Sequence
  Description of Artificial Sequence: Synthetic epitope
RMLRLSLNID

SEQ ID NO: 41831 - protein, 10 aa, Artificial Sequence
  Description of Artificial Sequence: Synthetic epitope
RMLRSNNKPK

SEQ ID NO: 41832 - protein, 10 aa, Artificial Sequence
  Description of Artificial Sequence: Synthetic epitope
RMLSIAVEVD

SEQ ID NO: 41833 - protein, 10 aa, Artificial Sequence
  Description of Artificial Sequence: Synthetic epitope
RMLSKKLTIK

SEQ ID NO: 41834 - protein, 10 aa, Artificial Sequence
  Description of Artificial Sequence: Synthetic epitope
RMLSVKFYSR

SEQ ID NO: 41835 - protein, 10 aa, Artificial Sequence
  Description of Artificial Sequence: Synthetic epitope
RMMKNQRVQL

SEQ ID NO: 41836 - protein, 10 aa, Artificial Sequence
  Description of Artificial Sequence: Synthetic epitope
RMMLGSFQFT

SEQ ID NO: 41837 - protein, 10 aa, Artificial Sequence
  Description of Artificial Sequence: Synthetic epitope
RMMSDTMASK

SEQ ID NO: 41838 - protein, 10 aa, Artificial Sequence
  Description of Artificial Sequence: Synthetic epitope
RMMSLTSSKA

SEQ ID NO: 41839 - protein, 10 aa, Artificial Sequence
  Description of Artificial Sequence: Synthetic epitope
RMNAERILAG

SEQ ID NO: 41840 - protein, 10 aa, Artificial Sequence
  Description of Artificial Sequence: Synthetic epitope
RMNKNRINNA

SEQ ID NO: 41841 - protein, 10 aa, Artificial Sequence
  Description of Artificial Sequence: Synthetic epitope
RMNLQTATAT

SEQ ID NO: 41842 - protein, 10 aa, Artificial Sequence
  Description of Artificial Sequence: Synthetic epitope
RMNSLEMTPA

SEQ ID NO: 41843 - protein, 10 aa, Artificial Sequence
  Description of Artificial Sequence: Synthetic epitope
RMNSRKGRYK

SEQ ID NO: 41844 - protein, 10 aa, Artificial Sequence
  Description of Artificial Sequence: Synthetic epitope
RMNWIDAPDD

SEQ ID NO: 41845 - protein, 10 aa, Artificial Sequence
  Description of Artificial Sequence: Synthetic epitope
RMNYMQNHQA

SEQ ID NO: 41846 - protein, 10 aa, Artificial Sequence
  Description of Artificial Sequence: Synthetic epitope
RMQEHLAKRE

SEQ ID NO: 41847 - protein, 10 aa, Artificial Sequence
  Description of Artificial Sequence: Synthetic epitope
RMQNTAKEHH

SEQ ID NO: 41848 - protein, 10 aa, Artificial Sequence
  Description of Artificial Sequence: Synthetic epitope
RMQPKSAELK

SEQ ID NO: 41849 - protein, 10 aa, Artificial Sequence
  Description of Artificial Sequence: Synthetic epitope
RMQRKWKKAE

SEQ ID NO: 41850 - protein, 10 aa, Artificial Sequence
  Description of Artificial Sequence: Synthetic epitope
RMQSTTGLQK

SEQ ID NO: 41851 - protein, 10 aa, Artificial Sequence
  Description of Artificial Sequence: Synthetic epitope
RMRESVSRMP

SEQ ID NO: 41852 - protein, 10 aa, Artificial Sequence
  Description of Artificial Sequence: Synthetic epitope
RMRSHGMTGA

SEQ ID NO: 41853 - protein, 10 aa, Artificial Sequence
  Description of Artificial Sequence: Synthetic epitope
RMSASQLEAL

SEQ ID NO: 41854 - protein, 10 aa, Artificial Sequence
  Description of Artificial Sequence: Synthetic epitope
RMSLEETKEQ

SEQ ID NO: 41855 - protein, 10 aa, Artificial Sequence
  Description of Artificial Sequence: Synthetic epitope
RMSNRFRKLK

SEQ ID NO: 41856 - protein, 10 aa, Artificial Sequence
  Description of Artificial Sequence: Synthetic epitope
RMSNSHTLSS

SEQ ID NO: 41857 - protein, 10 aa, Artificial Sequence
  Description of Artificial Sequence: Synthetic epitope
RMSQVVPFSQ

SEQ ID NO: 41858 - protein, 10 aa, Artificial Sequence
  Description of Artificial Sequence: Synthetic epitope
RMSRRGMVRK

SEQ ID NO: 41859 - protein, 10 aa, Artificial Sequence
  Description of Artificial Sequence: Synthetic epitope
RMSRSSGRSG

SEQ ID NO: 41860 - protein, 10 aa, Artificial Sequence
  Description of Artificial Sequence: Synthetic epitope
RMSSLQERKA

SEQ ID NO: 41861 - protein, 10 aa, Artificial Sequence
  Description of Artificial Sequence: Synthetic epitope
RMSVAEQVDY

SEQ ID NO: 41862 - protein, 10 aa, Artificial Sequence
  Description of Artificial Sequence: Synthetic epitope
RMSVGSRGSL

SEQ ID NO: 41863 - protein, 10 aa, Artificial Sequence
  Description of Artificial Sequence: Synthetic epitope
RMTANRKVEQ

SEQ ID NO: 41864 - protein, 10 aa, Artificial Sequence
  Description of Artificial Sequence: Synthetic epitope
RMTDTERDQI

SEQ ID NO: 41865 - protein, 10 aa, Artificial Sequence
  Description of Artificial Sequence: Synthetic epitope
RMTEHNSVKP

SEQ ID NO: 41866 - protein, 10 aa, Artificial Sequence
  Description of Artificial Sequence: Synthetic epitope
RMTIAAYQTL

SEQ ID NO: 41867 - protein, 10 aa, Artificial Sequence
  Description of Artificial Sequence: Synthetic epitope
RMTNEALHKG

SEQ ID NO: 41868 - protein, 10 aa, Artificial Sequence
  Description of Artificial Sequence: Synthetic epitope
RMTVLSTAQS

SEQ ID NO: 41869 - protein, 10 aa, Artificial Sequence
  Description of Artificial Sequence: Synthetic epitope
RMVEHKFTAV

SEQ ID NO: 41870 - protein, 10 aa, Artificial Sequence
  Description of Artificial Sequence: Synthetic epitope
RMVERSLRSE

SEQ ID NO: 41871 - protein, 10 aa, Artificial Sequence
  Description of Artificial Sequence: Synthetic epitope
RMVPAEKTRV

SEQ ID NO: 41872 - protein, 10 aa, Artificial Sequence
  Description of Artificial Sequence: Synthetic epitope
RMVTPAVSHQ

SEQ ID NO: 41873 - protein, 10 aa, Artificial Sequence
  Description of Artificial Sequence: Synthetic epitope
RMVVPTQSAQ

SEQ ID NO: 41874 - protein, 10 aa, Artificial Sequence
  Description of Artificial Sequence: Synthetic epitope
RMYIEAGNHR

SEQ ID NO: 41875 - protein, 10 aa, Artificial Sequence
  Description of Artificial Sequence: Synthetic epitope
RMYLNEYVLK

SEQ ID NO: 41876 - protein, 10 aa, Artificial Sequence
  Description of Artificial Sequence: Synthetic epitope
RMYQMEAEDT

SEQ ID NO: 41877 - protein, 10 aa, Artificial Sequence
  Description of Artificial Sequence: Synthetic epitope
RNAAENGAIQ

SEQ ID NO: 41878 - protein, 10 aa, Artificial Sequence
  Description of Artificial Sequence: Synthetic epitope
RNAELEAKMP

SEQ ID NO: 41879 - protein, 10 aa, Artificial Sequence
  Description of Artificial Sequence: Synthetic epitope
RNAEMAKVSE

SEQ ID NO: 41880 - protein, 10 aa, Artificial Sequence
  Description of Artificial Sequence: Synthetic epitope
RNAKLVGQSI

SEQ ID NO: 41881 - protein, 10 aa, Artificial Sequence
  Description of Artificial Sequence: Synthetic epitope
RNALSSLKIQ

SEQ ID NO: 41882 - protein, 10 aa, Artificial Sequence
  Description of Artificial Sequence: Synthetic epitope
RNANILEQLS

SEQ ID NO: 41883 - protein, 10 aa, Artificial Sequence
  Description of Artificial Sequence: Synthetic epitope
RNAQTKQLQA

SEQ ID NO: 41884 - protein, 10 aa, Artificial Sequence
  Description of Artificial Sequence: Synthetic epitope
RNAQTKQLQT

SEQ ID NO: 41885 - protein, 10 aa, Artificial Sequence
  Description of Artificial Sequence: Synthetic epitope
RNARNKDEMS

SEQ ID NO: 41886 - protein, 10 aa, Artificial Sequence
  Description of Artificial Sequence: Synthetic epitope
RNARRKAAPR

SEQ ID NO: 41887 - protein, 10 aa, Artificial Sequence
  Description of Artificial Sequence: Synthetic epitope
RNASGHHSKP

SEQ ID NO: 41888 - protein, 10 aa, Artificial Sequence
  Description of Artificial Sequence: Synthetic epitope
RNASKSVKLE

SEQ ID NO: 41889 - protein, 10 aa, Artificial Sequence
  Description of Artificial Sequence: Synthetic epitope
RNASLSAAGT

SEQ ID NO: 41890 - protein, 10 aa, Artificial Sequence
  Description of Artificial Sequence: Synthetic epitope
RNATLHSEVQ

SEQ ID NO: 41891 - protein, 10 aa, Artificial Sequence
  Description of Artificial Sequence: Synthetic epitope
RNATQAANAW

SEQ ID NO: 41892 - protein, 10 aa, Artificial Sequence
  Description of Artificial Sequence: Synthetic epitope
RNAVEMMIAR

SEQ ID NO: 41893 - protein, 10 aa, Artificial Sequence
  Description of Artificial Sequence: Synthetic epitope
RNDDKSISDA

SEQ ID NO: 41894 - protein, 10 aa, Artificial Sequence
  Description of Artificial Sequence: Synthetic epitope
RNDLSSTSTH

SEQ ID NO: 41895 - protein, 10 aa, Artificial Sequence
  Description of Artificial Sequence: Synthetic epitope
RNEAVVISGR

SEQ ID NO: 41896 - protein, 10 aa, Artificial Sequence
  Description of Artificial Sequence: Synthetic epitope
RNEDISVSKL

SEQ ID NO: 41897 - protein, 10 aa, Artificial Sequence
  Description of Artificial Sequence: Synthetic epitope
RNEEVQFGQH

SEQ ID NO: 41898 - protein, 10 aa, Artificial Sequence
  Description of Artificial Sequence: Synthetic epitope
RNEGTLAEMA

SEQ ID NO: 41899 - protein, 10 aa, Artificial Sequence
  Description of Artificial Sequence: Synthetic epitope
RNEKYDMVTD

SEQ ID NO: 41900 - protein, 10 aa, Artificial Sequence
  Description of Artificial Sequence: Synthetic epitope
RNESRTEGPI

SEQ ID NO: 41901 - protein, 10 aa, Artificial Sequence
  Description of Artificial Sequence: Synthetic epitope
RNFDRQKSRI

SEQ ID NO: 41902 - protein, 10 aa, Artificial Sequence
  Description of Artificial Sequence: Synthetic epitope
RNFLQKSQKP

SEQ ID NO: 41903 - protein, 10 aa, Artificial Sequence
  Description of Artificial Sequence: Synthetic epitope
RNFRMDIEQS

SEQ ID NO: 41904 - protein, 10 aa, Artificial Sequence
  Description of Artificial Sequence: Synthetic epitope
RNGDTASPKE

SEQ ID NO: 41905 - protein, 10 aa, Artificial Sequence
  Description of Artificial Sequence: Synthetic epitope
RNGKYVNIQE

SEQ ID NO: 41906 - protein, 10 aa, Artificial Sequence
  Description of Artificial Sequence: Synthetic epitope
RNGLDSSTEA

SEQ ID NO: 41907 - protein, 10 aa, Artificial Sequence
  Description of Artificial Sequence: Synthetic epitope
RNGRKTRMGL

SEQ ID NO: 41908 - protein, 10 aa, Artificial Sequence
  Description of Artificial Sequence: Synthetic epitope
RNGSTGQTAP

SEQ ID NO: 41909 - protein, 10 aa, Artificial Sequence
  Description of Artificial Sequence: Synthetic epitope
RNHEESSETM

SEQ ID NO: 41910 - protein, 10 aa, Artificial Sequence
  Description of Artificial Sequence: Synthetic epitope
RNHIQLVKLQ

SEQ ID NO: 41911 - protein, 10 aa, Artificial Sequence
  Description of Artificial Sequence: Synthetic epitope
RNIAKVVSQV

SEQ ID NO: 41912 - protein, 10 aa, Artificial Sequence
  Description of Artificial Sequence: Synthetic epitope
RNIAVTTSMS

SEQ ID NO: 41913 - protein, 10 aa, Artificial Sequence
  Description of Artificial Sequence: Synthetic epitope
RNIEEVRRTT

SEQ ID NO: 41914 - protein, 10 aa, Artificial Sequence
  Description of Artificial Sequence: Synthetic epitope
RNIEMTQEDV

SEQ ID NO: 41915 - protein, 10 aa, Artificial Sequence
  Description of Artificial Sequence: Synthetic epitope
RNILIRKVSS

SEQ ID NO: 41916 - protein, 10 aa, Artificial Sequence
  Description of Artificial Sequence: Synthetic epitope
RNINEKQISQ

SEQ ID NO: 41917 - protein, 10 aa, Artificial Sequence
  Description of Artificial Sequence: Synthetic epitope
RNIQTDNNKS

SEQ ID NO: 41918 - protein, 10 aa, Artificial Sequence
  Description of Artificial Sequence: Synthetic epitope
RNIRRAVVRL

SEQ ID NO: 41919 - protein, 10 aa, Artificial Sequence
  Description of Artificial Sequence: Synthetic epitope
RNIYKAEENF

SEQ ID NO: 41920 - protein, 10 aa, Artificial Sequence
  Description of Artificial Sequence: Synthetic epitope
RNKDGTSAYQ

SEQ ID NO: 41921 - protein, 10 aa, Artificial Sequence
  Description of Artificial Sequence: Synthetic epitope
RNKEKTSLAA

SEQ ID NO: 41922 - protein, 10 aa, Artificial Sequence
  Description of Artificial Sequence: Synthetic epitope
RNKELQVELS

SEQ ID NO: 41923 - protein, 10 aa, Artificial Sequence
  Description of Artificial Sequence: Synthetic epitope
RNKETLGSEA

SEQ ID NO: 41924 - protein, 10 aa, Artificial Sequence
  Description of Artificial Sequence: Synthetic epitope
RNKIINVQDL

SEQ ID NO: 41925 - protein, 10 aa, Artificial Sequence
  Description of Artificial Sequence: Synthetic epitope
RNKILYLIQA

SEQ ID NO: 41926 - protein, 10 aa, Artificial Sequence
  Description of Artificial Sequence: Synthetic epitope
RNKMISEGLD

SEQ ID NO: 41927 - protein, 10 aa, Artificial Sequence
  Description of Artificial Sequence: Synthetic epitope
RNKMKETILW

SEQ ID NO: 41928 - protein, 10 aa, Artificial Sequence
  Description of Artificial Sequence: Synthetic epitope
RNKQEKPASS

SEQ ID NO: 41929 - protein, 10 aa, Artificial Sequence
  Description of Artificial Sequence: Synthetic epitope
RNKQKMTKSS

SEQ ID NO: 41930 - protein, 10 aa, Artificial Sequence
  Description of Artificial Sequence: Synthetic epitope
RNKQSKLLME

SEQ ID NO: 41931 - protein, 10 aa, Artificial Sequence
  Description of Artificial Sequence: Synthetic epitope
RNKSKKNNSS

SEQ ID NO: 41932 - protein, 10 aa, Artificial Sequence
  Description of Artificial Sequence: Synthetic epitope
RNKTNEKLIA

SEQ ID NO: 41933 - protein, 10 aa, Artificial Sequence
  Description of Artificial Sequence: Synthetic epitope
RNKTQISLVR

SEQ ID NO: 41934 - protein, 10 aa, Artificial Sequence
  Description of Artificial Sequence: Synthetic epitope
RNKVESSPQV

SEQ ID NO: 41935 - protein, 10 aa, Artificial Sequence
  Description of Artificial Sequence: Synthetic epitope
RNKVSQEQSK

SEQ ID NO: 41936 - protein, 10 aa, Artificial Sequence
  Description of Artificial Sequence: Synthetic epitope
RNLASEKQQM

SEQ ID NO: 41937 - protein, 10 aa, Artificial Sequence
  Description of Artificial Sequence: Synthetic epitope
RNLKIDLDLT

SEQ ID NO: 41938 - protein, 10 aa, Artificial Sequence
  Description of Artificial Sequence: Synthetic epitope
RNLKRAMATG

SEQ ID NO: 41939 - protein, 10 aa, Artificial Sequence
  Description of Artificial Sequence: Synthetic epitope
RNLNLVSSTA

SEQ ID NO: 41940 - protein, 10 aa, Artificial Sequence
  Description of Artificial Sequence: Synthetic epitope
RNLQLLTQGT

SEQ ID NO: 41941 - protein, 10 aa, Artificial Sequence
  Description of Artificial Sequence: Synthetic epitope
RNLRKIQSAR

SEQ ID NO: 41942 - protein, 10 aa, Artificial Sequence
  Description of Artificial Sequence: Synthetic epitope
RNLRRLEALG

SEQ ID NO: 41943 - protein, 10 aa, Artificial Sequence
  Description of Artificial Sequence: Synthetic epitope
RNLRTLEQTG

SEQ ID NO: 41944 - protein, 10 aa, Artificial Sequence
  Description of Artificial Sequence: Synthetic epitope
RNLTATKFKL

SEQ ID NO: 41945 - protein, 10 aa, Artificial Sequence
  Description of Artificial Sequence: Synthetic epitope
RNLTVELEQK

SEQ ID NO: 41946 - protein, 10 aa, Artificial Sequence
  Description of Artificial Sequence: Synthetic epitope
RNLVALKADK

SEQ ID NO: 41947 - protein, 10 aa, Artificial Sequence
  Description of Artificial Sequence: Synthetic epitope
RNLVDSSLVR

SEQ ID NO: 41948 - protein, 10 aa, Artificial Sequence
  Description of Artificial Sequence: Synthetic epitope
RNLVERLKSQ

SEQ ID NO: 41949 - protein, 10 aa, Artificial Sequence
  Description of Artificial Sequence: Synthetic epitope
RNMKKASSPQ

SEQ ID NO: 41950 - protein, 10 aa, Artificial Sequence
  Description of Artificial Sequence: Synthetic epitope
RNMVNVKMPF

SEQ ID NO: 41951 - protein, 10 aa, Artificial Sequence
  Description of Artificial Sequence: Synthetic epitope
RNNEKMLSDS

SEQ ID NO: 41952 - protein, 10 aa, Artificial Sequence
  Description of Artificial Sequence: Synthetic epitope
RNNEKMLSDS

SEQ ID NO: 41953 - protein, 10 aa, Artificial Sequence
  Description of Artificial Sequence: Synthetic epitope
RNNEPNSQSK

SEQ ID NO: 41954 - protein, 10 aa, Artificial Sequence
  Description of Artificial Sequence: Synthetic epitope
RNNSTESSEE

SEQ ID NO: 41955 - protein, 10 aa, Artificial Sequence
  Description of Artificial Sequence: Synthetic epitope
RNNTIQTMEE

SEQ ID NO: 41956 - protein, 10 aa, Artificial Sequence
  Description of Artificial Sequence: Synthetic epitope
RNNYAEMHAY

SEQ ID NO: 41957 - protein, 10 aa, Artificial Sequence
  Description of Artificial Sequence: Synthetic epitope
RNNYALNTTA

SEQ ID NO: 41958 - protein, 10 aa, Artificial Sequence
  Description of Artificial Sequence: Synthetic epitope
RNPAKLKRAK

SEQ ID NO: 41959 - protein, 10 aa, Artificial Sequence
  Description of Artificial Sequence: Synthetic epitope
RNPELMATNK

SEQ ID NO: 41960 - protein, 10 aa, Artificial Sequence
  Description of Artificial Sequence: Synthetic epitope
RNPSSQNAHS

SEQ ID NO: 41961 - protein, 10 aa, Artificial Sequence
  Description of Artificial Sequence: Synthetic epitope
RNPVQISQEQ

SEQ ID NO: 41962 - protein, 10 aa, Artificial Sequence
  Description of Artificial Sequence: Synthetic epitope
RNQANMVQKS

SEQ ID NO: 41963 - protein, 10 aa, Artificial Sequence
  Description of Artificial Sequence: Synthetic epitope
RNQASLRSSK

SEQ ID NO: 41964 - protein, 10 aa, Artificial Sequence
  Description of Artificial Sequence: Synthetic epitope
RNQEERLLAD

SEQ ID NO: 41965 - protein, 10 aa, Artificial Sequence
  Description of Artificial Sequence: Synthetic epitope
RNQKEASQSR

SEQ ID NO: 41966 - protein, 10 aa, Artificial Sequence
  Description of Artificial Sequence: Synthetic epitope
RNQKRQINYK

SEQ ID NO: 41967 - protein, 10 aa, Artificial Sequence
  Description of Artificial Sequence: Synthetic epitope
RNQMGRNSMK

SEQ ID NO: 41968 - protein, 10 aa, Artificial Sequence
  Description of Artificial Sequence: Synthetic epitope
RNQNSMYMRQ

SEQ ID NO: 41969 - protein, 10 aa, Artificial Sequence
  Description of Artificial Sequence: Synthetic epitope
RNQVEESTKQ

SEQ ID NO: 41970 - protein, 10 aa, Artificial Sequence
  Description of Artificial Sequence: Synthetic epitope
RNRAALSQKP

SEQ ID NO: 41971 - protein, 10 aa, Artificial Sequence
  Description of Artificial Sequence: Synthetic epitope
RNRALMSPAG

SEQ ID NO: 41972 - protein, 10 aa, Artificial Sequence
  Description of Artificial Sequence: Synthetic epitope
RNRIDQASLD

SEQ ID NO: 41973 - protein, 10 aa, Artificial Sequence
  Description of Artificial Sequence: Synthetic epitope
RNRLFNLGTM

SEQ ID NO: 41974 - protein, 10 aa, Artificial Sequence
  Description of Artificial Sequence: Synthetic epitope
RNRLKASREV

SEQ ID NO: 41975 - protein, 10 aa, Artificial Sequence
  Description of Artificial Sequence: Synthetic epitope
RNRQDEIKNK

SEQ ID NO: 41976 - protein, 10 aa, Artificial Sequence
  Description of Artificial Sequence: Synthetic epitope
RNRQNRSRGQ

SEQ ID NO: 41977 - protein, 10 aa, Artificial Sequence
  Description of Artificial Sequence: Synthetic epitope
RNRSSASMAK

SEQ ID NO: 41978 - protein, 10 aa, Artificial Sequence
  Description of Artificial Sequence: Synthetic epitope
RNRSTKVIKP

SEQ ID NO: 41979 - protein, 10 aa, Artificial Sequence
  Description of Artificial Sequence: Synthetic epitope
RNRTETRGIQ

SEQ ID NO: 41980 - protein, 10 aa, Artificial Sequence
  Description of Artificial Sequence: Synthetic epitope
RNSDFSAGSP

SEQ ID NO: 41981 - protein, 10 aa, Artificial Sequence
  Description of Artificial Sequence: Synthetic epitope
RNSEMTSAMK

SEQ ID NO: 41982 - protein, 10 aa, Artificial Sequence
  Description of Artificial Sequence: Synthetic epitope
RNSFKLSRVP

SEQ ID NO: 41983 - protein, 10 aa, Artificial Sequence
  Description of Artificial Sequence: Synthetic epitope
RNSHTIMQIQ

SEQ ID NO: 41984 - protein, 10 aa, Artificial Sequence
  Description of Artificial Sequence: Synthetic epitope
RNSIKDAQSR

SEQ ID NO: 41985 - protein, 10 aa, Artificial Sequence
  Description of Artificial Sequence: Synthetic epitope
RNSISRIMSE

SEQ ID NO: 41986 - protein, 10 aa, Artificial Sequence
  Description of Artificial Sequence: Synthetic epitope
RNSKGQLEVM

SEQ ID NO: 41987 - protein, 10 aa, Artificial Sequence
  Description of Artificial Sequence: Synthetic epitope
RNSKYIKKFP

SEQ ID NO: 41988 - protein, 10 aa, Artificial Sequence
  Description of Artificial Sequence: Synthetic epitope
RNSMESQQRI

SEQ ID NO: 41989 - protein, 10 aa, Artificial Sequence
  Description of Artificial Sequence: Synthetic epitope
RNSNDAPTPM

SEQ ID NO: 41990 - protein, 10 aa, Artificial Sequence
  Description of Artificial Sequence: Synthetic epitope
RNSQISNEND

SEQ ID NO: 41991 - protein, 10 aa, Artificial Sequence
  Description of Artificial Sequence: Synthetic epitope
RNSSELAQRK

SEQ ID NO: 41992 - protein, 10 aa, Artificial Sequence
  Description of Artificial Sequence: Synthetic epitope
RNSSELSGLV

SEQ ID NO: 41993 - protein, 10 aa, Artificial Sequence
  Description of Artificial Sequence: Synthetic epitope
RNSSEQLSQK

SEQ ID NO: 41994 - protein, 10 aa, Artificial Sequence
  Description of Artificial Sequence: Synthetic epitope
RNSSFSTARS

SEQ ID NO: 41995 - protein, 10 aa, Artificial Sequence
  Description of Artificial Sequence: Synthetic epitope
RNSSLLTQKQ

SEQ ID NO: 41996 - protein, 10 aa, Artificial Sequence
  Description of Artificial Sequence: Synthetic epitope
RNSTNKKSNS

SEQ ID NO: 41997 - protein, 10 aa, Artificial Sequence
  Description of Artificial Sequence: Synthetic epitope
RNSVTVQVMA

SEQ ID NO: 41998 - protein, 10 aa, Artificial Sequence
  Description of Artificial Sequence: Synthetic epitope
RNSWDHRIQA

SEQ ID NO: 41999 - protein, 10 aa, Artificial Sequence
  Description of Artificial Sequence: Synthetic epitope
RNTAGGSNFD

SEQ ID NO: 42000 - protein, 10 aa, Artificial Sequence
  Description of Artificial Sequence: Synthetic epitope
RNTEILTGSW

SEQ ID NO: 42001 - protein, 10 aa, Artificial Sequence
  Description of Artificial Sequence: Synthetic epitope
RNTEKRNREQ

SEQ ID NO: 42002 - protein, 10 aa, Artificial Sequence
  Description of Artificial Sequence: Synthetic epitope
RNTLVALKGE

SEQ ID NO: 42003 - protein, 10 aa, Artificial Sequence
  Description of Artificial Sequence: Synthetic epitope
RNTQAILKDT

SEQ ID NO: 42004 - protein, 10 aa, Artificial Sequence
  Description of Artificial Sequence: Synthetic epitope
RNTQEVMAMN

SEQ ID NO: 42005 - protein, 10 aa, Artificial Sequence
  Description of Artificial Sequence: Synthetic epitope
RNTQLMASST

SEQ ID NO: 42006 - protein, 10 aa, Artificial Sequence
  Description of Artificial Sequence: Synthetic epitope
RNTSETSLYQ

SEQ ID NO: 42007 - protein, 10 aa, Artificial Sequence
  Description of Artificial Sequence: Synthetic epitope
RNTSQALFSD

SEQ ID NO: 42008 - protein, 10 aa, Artificial Sequence
  Description of Artificial Sequence: Synthetic epitope
RNTSRMAEDT

SEQ ID NO: 42009 - protein, 10 aa, Artificial Sequence
  Description of Artificial Sequence: Synthetic epitope
RNTSTMIGAG

SEQ ID NO: 42010 - protein, 10 aa, Artificial Sequence
  Description of Artificial Sequence: Synthetic epitope
RNTTKQVTPQ

SEQ ID NO: 42011 - protein, 10 aa, Artificial Sequence
  Description of Artificial Sequence: Synthetic epitope
RNTVADVDEK

SEQ ID NO: 42012 - protein, 10 aa, Artificial Sequence
  Description of Artificial Sequence: Synthetic epitope
RNTVETEREE

SEQ ID NO: 42013 - protein, 10 aa, Artificial Sequence
  Description of Artificial Sequence: Synthetic epitope
RNVDNDSPTS

SEQ ID NO: 42014 - protein, 10 aa, Artificial Sequence
  Description of Artificial Sequence: Synthetic epitope
RNVEESEKGS

SEQ ID NO: 42015 - protein, 10 aa, Artificial Sequence
  Description of Artificial Sequence: Synthetic epitope
RNVESYTKLG

SEQ ID NO: 42016 - protein, 10 aa, Artificial Sequence
  Description of Artificial Sequence: Synthetic epitope
RNVFHLVMPL

SEQ ID NO: 42017 - protein, 10 aa, Artificial Sequence
  Description of Artificial Sequence: Synthetic epitope
RNVKESAAHD

SEQ ID NO: 42018 - protein, 10 aa, Artificial Sequence
  Description of Artificial Sequence: Synthetic epitope
RNVQQIGILK

SEQ ID NO: 42019 - protein, 10 aa, Artificial Sequence
  Description of Artificial Sequence: Synthetic epitope
RNVRTAMTNR

SEQ ID NO: 42020 - protein, 10 aa, Artificial Sequence
  Description of Artificial Sequence: Synthetic epitope
RNVSSLADLK

SEQ ID NO: 42021 - protein, 10 aa, Artificial Sequence
  Description of Artificial Sequence: Synthetic epitope
RNVTDFLKRA

SEQ ID NO: 42022 - protein, 10 aa, Artificial Sequence
  Description of Artificial Sequence: Synthetic epitope
RNVYEESITE

SEQ ID NO: 42023 - protein, 10 aa, Artificial Sequence
  Description of Artificial Sequence: Synthetic epitope
RNWQTQVLEE

SEQ ID NO: 42024 - protein, 10 aa, Artificial Sequence
  Description of Artificial Sequence: Synthetic epitope
RNYGQVKLGR

SEQ ID NO: 42025 - protein, 10 aa, Artificial Sequence
  Description of Artificial Sequence: Synthetic epitope
RNYKQVPVYD

SEQ ID NO: 42026 - protein, 10 aa, Artificial Sequence
  Description of Artificial Sequence: Synthetic epitope
RNYSSAVQKF

SEQ ID NO: 42027 - protein, 10 aa, Artificial Sequence
  Description of Artificial Sequence: Synthetic epitope
RPAADNSASS

SEQ ID NO: 42028 - protein, 10 aa, Artificial Sequence
  Description of Artificial Sequence: Synthetic epitope
RPAAEALRQP

SEQ ID NO: 42029 - protein, 10 aa, Artificial Sequence
  Description of Artificial Sequence: Synthetic epitope
RPAASLLTEL

SEQ ID NO: 42030 - protein, 10 aa, Artificial Sequence
  Description of Artificial Sequence: Synthetic epitope
RPAEFETTSE

SEQ ID NO: 42031 - protein, 10 aa, Artificial Sequence
  Description of Artificial Sequence: Synthetic epitope
RPARQTSRTD

SEQ ID NO: 42032 - protein, 10 aa, Artificial Sequence
  Description of Artificial Sequence: Synthetic epitope
RPAVEASTGG

SEQ ID NO: 42033 - protein, 10 aa, Artificial Sequence
  Description of Artificial Sequence: Synthetic epitope
RPDISKVNPS

SEQ ID NO: 42034 - protein, 10 aa, Artificial Sequence
  Description of Artificial Sequence: Synthetic epitope
RPEEVVSQTP

SEQ ID NO: 42035 - protein, 10 aa, Artificial Sequence
  Description of Artificial Sequence: Synthetic epitope
RPELLAVIKL

SEQ ID NO: 42036 - protein, 10 aa, Artificial Sequence
  Description of Artificial Sequence: Synthetic epitope
RPESALLGGS

SEQ ID NO: 42037 - protein, 10 aa, Artificial Sequence
  Description of Artificial Sequence: Synthetic epitope
RPESEQARQR

SEQ ID NO: 42038 - protein, 10 aa, Artificial Sequence
  Description of Artificial Sequence: Synthetic epitope
RPETTETTEV

SEQ ID NO: 42039 - protein, 10 aa, Artificial Sequence
  Description of Artificial Sequence: Synthetic epitope
RPETVSMVIY

SEQ ID NO: 42040 - protein, 10 aa, Artificial Sequence
  Description of Artificial Sequence: Synthetic epitope
RPFKASLLNI

SEQ ID NO: 42041 - protein, 10 aa, Artificial Sequence
  Description of Artificial Sequence: Synthetic epitope
RPFSALIEDS

SEQ ID NO: 42042 - protein, 10 aa, Artificial Sequence
  Description of Artificial Sequence: Synthetic epitope
RPFVRATLQE

SEQ ID NO: 42043 - protein, 10 aa, Artificial Sequence
  Description of Artificial Sequence: Synthetic epitope
RPGSKSQSHP

SEQ ID NO: 42044 - protein, 10 aa, Artificial Sequence
  Description of Artificial Sequence: Synthetic epitope
RPHGGMLPRK

SEQ ID NO: 42045 - protein, 10 aa, Artificial Sequence
  Description of Artificial Sequence: Synthetic epitope
RPIEKLQNPI

SEQ ID NO: 42046 - protein, 10 aa, Artificial Sequence
  Description of Artificial Sequence: Synthetic epitope
RPIGDAADTQ

SEQ ID NO: 42047 - protein, 10 aa, Artificial Sequence
  Description of Artificial Sequence: Synthetic epitope
RPKEKALNST

SEQ ID NO: 42048 - protein, 10 aa, Artificial Sequence
  Description of Artificial Sequence: Synthetic epitope
RPKISRFTWS

SEQ ID NO: 42049 - protein, 10 aa, Artificial Sequence
  Description of Artificial Sequence: Synthetic epitope
RPKKEKDGSS

SEQ ID NO: 42050 - protein, 10 aa, Artificial Sequence
  Description of Artificial Sequence: Synthetic epitope
RPKNDVTNHV

SEQ ID NO: 42051 - protein, 10 aa, Artificial Sequence
  Description of Artificial Sequence: Synthetic epitope
RPKSEKVPDK

SEQ ID NO: 42052 - protein, 10 aa, Artificial Sequence
  Description of Artificial Sequence: Synthetic epitope
RPKSTSTSSM

SEQ ID NO: 42053 - protein, 10 aa, Artificial Sequence
  Description of Artificial Sequence: Synthetic epitope
RPKTFGMDMK

SEQ ID NO: 42054 - protein, 10 aa, Artificial Sequence
  Description of Artificial Sequence: Synthetic epitope
RPLILSGNQT

SEQ ID NO: 42055 - protein, 10 aa, Artificial Sequence
  Description of Artificial Sequence: Synthetic epitope
RPLKISSDDF

SEQ ID NO: 42056 - protein, 10 aa, Artificial Sequence
  Description of Artificial Sequence: Synthetic epitope
RPLKLDSTLE

SEQ ID NO: 42057 - protein, 10 aa, Artificial Sequence
  Description of Artificial Sequence: Synthetic epitope
RPLLRLVALQ

SEQ ID NO: 42058 - protein, 10 aa, Artificial Sequence
  Description of Artificial Sequence: Synthetic epitope
RPLSALAEAG

SEQ ID NO: 42059 - protein, 10 aa, Artificial Sequence
  Description of Artificial Sequence: Synthetic epitope
RPLSARSEPS

SEQ ID NO: 42060 - protein, 10 aa, Artificial Sequence
  Description of Artificial Sequence: Synthetic epitope
RPLTIGKEVT

SEQ ID NO: 42061 - protein, 10 aa, Artificial Sequence
  Description of Artificial Sequence: Synthetic epitope
RPLTSLYIRL

SEQ ID NO: 42062 - protein, 10 aa, Artificial Sequence
  Description of Artificial Sequence: Synthetic epitope
RPMKKTIAEI

SEQ ID NO: 42063 - protein, 10 aa, Artificial Sequence
  Description of Artificial Sequence: Synthetic epitope
RPMRERTAVQ

SEQ ID NO: 42064 - protein, 10 aa, Artificial Sequence
  Description of Artificial Sequence: Synthetic epitope
RPNTVEKATD

SEQ ID NO: 42065 - protein, 10 aa, Artificial Sequence
  Description of Artificial Sequence: Synthetic epitope
RPPLSFNVSL

SEQ ID NO: 42066 - protein, 10 aa, Artificial Sequence
  Description of Artificial Sequence: Synthetic epitope
RPPQSALSTT

SEQ ID NO: 42067 - protein, 10 aa, Artificial Sequence
  Description of Artificial Sequence: Synthetic epitope
RPPSTSSTGS

SEQ ID NO: 42068 - protein, 10 aa, Artificial Sequence
  Description of Artificial Sequence: Synthetic epitope
RPQQDLARLV

SEQ ID NO: 42069 - protein, 10 aa, Artificial Sequence
  Description of Artificial Sequence: Synthetic epitope
RPQQTSVEPA

SEQ ID NO: 42070 - protein, 10 aa, Artificial Sequence
  Description of Artificial Sequence: Synthetic epitope
RPQTALEENE

SEQ ID NO: 42071 - protein, 10 aa, Artificial Sequence
  Description of Artificial Sequence: Synthetic epitope
RPQVSDAGGR

SEQ ID NO: 42072 - protein, 10 aa, Artificial Sequence
  Description of Artificial Sequence: Synthetic epitope
RPRARAKQVR

SEQ ID NO: 42073 - protein, 10 aa, Artificial Sequence
  Description of Artificial Sequence: Synthetic epitope
RPRKKALEED

SEQ ID NO: 42074 - protein, 10 aa, Artificial Sequence
  Description of Artificial Sequence: Synthetic epitope
RPRLALMYRM

SEQ ID NO: 42075 - protein, 10 aa, Artificial Sequence
  Description of Artificial Sequence: Synthetic epitope
RPRSQSSKAA

SEQ ID NO: 42076 - protein, 10 aa, Artificial Sequence
  Description of Artificial Sequence: Synthetic epitope
RPRSSLSLAS

SEQ ID NO: 42077 - protein, 10 aa, Artificial Sequence
  Description of Artificial Sequence: Synthetic epitope
RPRVEYPAHQ

SEQ ID NO: 42078 - protein, 10 aa, Artificial Sequence
  Description of Artificial Sequence: Synthetic epitope
RPRVSSTEMN

SEQ ID NO: 42079 - protein, 10 aa, Artificial Sequence
  Description of Artificial Sequence: Synthetic epitope
RPRVVRAEPR

SEQ ID NO: 42080 - protein, 10 aa, Artificial Sequence
  Description of Artificial Sequence: Synthetic epitope
RPSMASELMP

SEQ ID NO: 42081 - protein, 10 aa, Artificial Sequence
  Description of Artificial Sequence: Synthetic epitope
RPSNTKSKKD

SEQ ID NO: 42082 - protein, 10 aa, Artificial Sequence
  Description of Artificial Sequence: Synthetic epitope
RPSPISATPP

SEQ ID NO: 42083 - protein, 10 aa, Artificial Sequence
  Description of Artificial Sequence: Synthetic epitope
RPSQEQSASA

SEQ ID NO: 42084 - protein, 10 aa, Artificial Sequence
  Description of Artificial Sequence: Synthetic epitope
RPSSAAQLQT

SEQ ID NO: 42085 - protein, 10 aa, Artificial Sequence
  Description of Artificial Sequence: Synthetic epitope
RPSSKQNTPQ

SEQ ID NO: 42086 - protein, 10 aa, Artificial Sequence
  Description of Artificial Sequence: Synthetic epitope
RPSSLTAAMS

SEQ ID NO: 42087 - protein, 10 aa, Artificial Sequence
  Description of Artificial Sequence: Synthetic epitope
RPSSQPIMSQ

SEQ ID NO: 42088 - protein, 10 aa, Artificial Sequence
  Description of Artificial Sequence: Synthetic epitope
RPSSQSSKKE

SEQ ID NO: 42089 - protein, 10 aa, Artificial Sequence
  Description of Artificial Sequence: Synthetic epitope
RPSSRSLTEE

SEQ ID NO: 42090 - protein, 10 aa, Artificial Sequence
  Description of Artificial Sequence: Synthetic epitope
RPSTSSASGQ

SEQ ID NO: 42091 - protein, 10 aa, Artificial Sequence
  Description of Artificial Sequence: Synthetic epitope
RPSVQAQAQA

SEQ ID NO: 42092 - protein, 10 aa, Artificial Sequence
  Description of Artificial Sequence: Synthetic epitope
RPSWSLSAKL

SEQ ID NO: 42093 - protein, 10 aa, Artificial Sequence
  Description of Artificial Sequence: Synthetic epitope
RPTDSTQPQL

SEQ ID NO: 42094 - protein, 10 aa, Artificial Sequence
  Description of Artificial Sequence: Synthetic epitope
RPTEATVSLS

SEQ ID NO: 42095 - protein, 10 aa, Artificial Sequence
  Description of Artificial Sequence: Synthetic epitope
RPTNMDRERD

SEQ ID NO: 42096 - protein, 10 aa, Artificial Sequence
  Description of Artificial Sequence: Synthetic epitope
RPTQEKIFVK

SEQ ID NO: 42097 - protein, 10 aa, Artificial Sequence
  Description of Artificial Sequence: Synthetic epitope
RPTQSVQSQA

SEQ ID NO: 42098 - protein, 10 aa, Artificial Sequence
  Description of Artificial Sequence: Synthetic epitope
RPTSMTLTTS

SEQ ID NO: 42099 - protein, 10 aa, Artificial Sequence
  Description of Artificial Sequence: Synthetic epitope
RPTVMSATFE

SEQ ID NO: 42100 - protein, 10 aa, Artificial Sequence
  Description of Artificial Sequence: Synthetic epitope
RPVLSLSSGS

SEQ ID NO: 42101 - protein, 10 aa, Artificial Sequence
  Description of Artificial Sequence: Synthetic epitope
RPVQIITSNN

SEQ ID NO: 42102 - protein, 10 aa, Artificial Sequence
  Description of Artificial Sequence: Synthetic epitope
RPVRASERKA

SEQ ID NO: 42103 - protein, 10 aa, Artificial Sequence
  Description of Artificial Sequence: Synthetic epitope
RPVSTSASKP

SEQ ID NO: 42104 - protein, 10 aa, Artificial Sequence
  Description of Artificial Sequence: Synthetic epitope
RPVTQTDVYR

SEQ ID NO: 42105 - protein, 10 aa, Artificial Sequence
  Description of Artificial Sequence: Synthetic epitope
RPVVQVVDER

SEQ ID NO: 42106 - protein, 10 aa, Artificial Sequence
  Description of Artificial Sequence: Synthetic epitope
RPWDRSLENV

SEQ ID NO: 42107 - protein, 10 aa, Artificial Sequence
  Description of Artificial Sequence: Synthetic epitope
RPYKKHHREE

SEQ ID NO: 42108 - protein, 10 aa, Artificial Sequence
  Description of Artificial Sequence: Synthetic epitope
RPYKQQNQVK

SEQ ID NO: 42109 - protein, 10 aa, Artificial Sequence
  Description of Artificial Sequence: Synthetic epitope
RQAATEFGWT

SEQ ID NO: 42110 - protein, 10 aa, Artificial Sequence
  Description of Artificial Sequence: Synthetic epitope
RQAEALQEVP

SEQ ID NO: 42111 - protein, 10 aa, Artificial Sequence
  Description of Artificial Sequence: Synthetic epitope
RQAEKMGIDF

SEQ ID NO: 42112 - protein, 10 aa, Artificial Sequence
  Description of Artificial Sequence: Synthetic epitope
RQAELGREIH

SEQ ID NO: 42113 - protein, 10 aa, Artificial Sequence
  Description of Artificial Sequence: Synthetic epitope
RQAEPVQKQG

SEQ ID NO: 42114 - protein, 10 aa, Artificial Sequence
  Description of Artificial Sequence: Synthetic epitope
RQAFDPVQFN

SEQ ID NO: 42115 - protein, 10 aa, Artificial Sequence
  Description of Artificial Sequence: Synthetic epitope
RQAIADEQKK

SEQ ID NO: 42116 - protein, 10 aa, Artificial Sequence
  Description of Artificial Sequence: Synthetic epitope
RQAIERQLPA

SEQ ID NO: 42117 - protein, 10 aa, Artificial Sequence
  Description of Artificial Sequence: Synthetic epitope
RQAKFYLTSQ

SEQ ID NO: 42118 - protein, 10 aa, Artificial Sequence
  Description of Artificial Sequence: Synthetic epitope
RQAKNIVLKF

SEQ ID NO: 42119 - protein, 10 aa, Artificial Sequence
  Description of Artificial Sequence: Synthetic epitope
RQALAQANLE

SEQ ID NO: 42120 - protein, 10 aa, Artificial Sequence
  Description of Artificial Sequence: Synthetic epitope
RQALEKQGRE

SEQ ID NO: 42121 - protein, 10 aa, Artificial Sequence
  Description of Artificial Sequence: Synthetic epitope
RQALKNTIKR

SEQ ID NO: 42122 - protein, 10 aa, Artificial Sequence
  Description of Artificial Sequence: Synthetic epitope
RQALLEAQDD

SEQ ID NO: 42123 - protein, 10 aa, Artificial Sequence
  Description of Artificial Sequence: Synthetic epitope
RQALSTATAT

SEQ ID NO: 42124 - protein, 10 aa, Artificial Sequence
  Description of Artificial Sequence: Synthetic epitope
RQAPRLVGLN

SEQ ID NO: 42125 - protein, 10 aa, Artificial Sequence
  Description of Artificial Sequence: Synthetic epitope
RQAQHLAETG

SEQ ID NO: 42126 - protein, 10 aa, Artificial Sequence
  Description of Artificial Sequence: Synthetic epitope
RQAQRQENAL

SEQ ID NO: 42127 - protein, 10 aa, Artificial Sequence
  Description of Artificial Sequence: Synthetic epitope
RQAQRSSASE

SEQ ID NO: 42128 - protein, 10 aa, Artificial Sequence
  Description of Artificial Sequence: Synthetic epitope
RQAQSMIQQL

SEQ ID NO: 42129 - protein, 10 aa, Artificial Sequence
  Description of Artificial Sequence: Synthetic epitope
RQAREQTGKM

SEQ ID NO: 42130 - protein, 10 aa, Artificial Sequence
  Description of Artificial Sequence: Synthetic epitope
RQARISVNSG

SEQ ID NO: 42131 - protein, 10 aa, Artificial Sequence
  Description of Artificial Sequence: Synthetic epitope
RQASGSARQV

SEQ ID NO: 42132 - protein, 10 aa, Artificial Sequence
  Description of Artificial Sequence: Synthetic epitope
RQATARTVTP

SEQ ID NO: 42133 - protein, 10 aa, Artificial Sequence
  Description of Artificial Sequence: Synthetic epitope
RQATSTASTF

SEQ ID NO: 42134 - protein, 10 aa, Artificial Sequence
  Description of Artificial Sequence: Synthetic epitope
RQAVFTAKYS

SEQ ID NO: 42135 - protein, 10 aa, Artificial Sequence
  Description of Artificial Sequence: Synthetic epitope
RQAVKAVQQK

SEQ ID NO: 42136 - protein, 10 aa, Artificial Sequence
  Description of Artificial Sequence: Synthetic epitope
RQDAEMKESI

SEQ ID NO: 42137 - protein, 10 aa, Artificial Sequence
  Description of Artificial Sequence: Synthetic epitope
RQDGQRVQGG

SEQ ID NO: 42138 - protein, 10 aa, Artificial Sequence
  Description of Artificial Sequence: Synthetic epitope
RQDSSVVGDS

SEQ ID NO: 42139 - protein, 10 aa, Artificial Sequence
  Description of Artificial Sequence: Synthetic epitope
RQEATNATRV

SEQ ID NO: 42140 - protein, 10 aa, Artificial Sequence
  Description of Artificial Sequence: Synthetic epitope
RQEEMLKTEE

SEQ ID NO: 42141 - protein, 10 aa, Artificial Sequence
  Description of Artificial Sequence: Synthetic epitope
RQEGAASQDA

SEQ ID NO: 42142 - protein, 10 aa, Artificial Sequence
  Description of Artificial Sequence: Synthetic epitope
RQEHQISRSQ

SEQ ID NO: 42143 - protein, 10 aa, Artificial Sequence
  Description of Artificial Sequence: Synthetic epitope
RQEHTELMEQ

SEQ ID NO: 42144 - protein, 10 aa, Artificial Sequence
  Description of Artificial Sequence: Synthetic epitope
RQELALKARI

SEQ ID NO: 42145 - protein, 10 aa, Artificial Sequence
  Description of Artificial Sequence: Synthetic epitope
RQELDATKAR

SEQ ID NO: 42146 - protein, 10 aa, Artificial Sequence
  Description of Artificial Sequence: Synthetic epitope
RQELSQLGSQ

SEQ ID NO: 42147 - protein, 10 aa, Artificial Sequence
  Description of Artificial Sequence: Synthetic epitope
RQEMARQKSG

SEQ ID NO: 42148 - protein, 10 aa, Artificial Sequence
  Description of Artificial Sequence: Synthetic epitope
RQENSRFQAQ

SEQ ID NO: 42149 - protein, 10 aa, Artificial Sequence
  Description of Artificial Sequence: Synthetic epitope
RQESASRYAE

SEQ ID NO: 42150 - protein, 10 aa, Artificial Sequence
  Description of Artificial Sequence: Synthetic epitope
RQESSKISTE

SEQ ID NO: 42151 - protein, 10 aa, Artificial Sequence
  Description of Artificial Sequence: Synthetic epitope
RQESVQLEEN

SEQ ID NO: 42152 - protein, 10 aa, Artificial Sequence
  Description of Artificial Sequence: Synthetic epitope
RQETSLTSHD

SEQ ID NO: 42153 - protein, 10 aa, Artificial Sequence
  Description of Artificial Sequence: Synthetic epitope
RQETTDSKSS

SEQ ID NO: 42154 - protein, 10 aa, Artificial Sequence
  Description of Artificial Sequence: Synthetic epitope
RQEVSSPRKE

SEQ ID NO: 42155 - protein, 10 aa, Artificial Sequence
  Description of Artificial Sequence: Synthetic epitope
RQFARNQKDF

SEQ ID NO: 42156 - protein, 10 aa, Artificial Sequence
  Description of Artificial Sequence: Synthetic epitope
RQFKAKDQTR

SEQ ID NO: 42157 - protein, 10 aa, Artificial Sequence
  Description of Artificial Sequence: Synthetic epitope
RQGAELKAAE

SEQ ID NO: 42158 - protein, 10 aa, Artificial Sequence
  Description of Artificial Sequence: Synthetic epitope
RQGDMTDSRT

SEQ ID NO: 42159 - protein, 10 aa, Artificial Sequence
  Description of Artificial Sequence: Synthetic epitope
RQGDTQAKYA

SEQ ID NO: 42160 - protein, 10 aa, Artificial Sequence
  Description of Artificial Sequence: Synthetic epitope
RQGEQRTKKR

SEQ ID NO: 42161 - protein, 10 aa, Artificial Sequence
  Description of Artificial Sequence: Synthetic epitope
RQGFSKSSKK

SEQ ID NO: 42162 - protein, 10 aa, Artificial Sequence
  Description of Artificial Sequence: Synthetic epitope
RQGGIQLLVD

SEQ ID NO: 42163 - protein, 10 aa, Artificial Sequence
  Description of Artificial Sequence: Synthetic epitope
RQGGSVAQAP

SEQ ID NO: 42164 - protein, 10 aa, Artificial Sequence
  Description of Artificial Sequence: Synthetic epitope
RQGKLSIKTD

SEQ ID NO: 42165 - protein, 10 aa, Artificial Sequence
  Description of Artificial Sequence: Synthetic epitope
RQGLNLAATA

SEQ ID NO: 42166 - protein, 10 aa, Artificial Sequence
  Description of Artificial Sequence: Synthetic epitope
RQGLSVRQIR

SEQ ID NO: 42167 - protein, 10 aa, Artificial Sequence
  Description of Artificial Sequence: Synthetic epitope
RQGNSKNVLL

SEQ ID NO: 42168 - protein, 10 aa, Artificial Sequence
  Description of Artificial Sequence: Synthetic epitope
RQGSAQVMMD

SEQ ID NO: 42169 - protein, 10 aa, Artificial Sequence
  Description of Artificial Sequence: Synthetic epitope
RQHESMQELE

SEQ ID NO: 42170 - protein, 10 aa, Artificial Sequence
  Description of Artificial Sequence: Synthetic epitope
RQHLNSISMQ

SEQ ID NO: 42171 - protein, 10 aa, Artificial Sequence
  Description of Artificial Sequence: Synthetic epitope
RQHVIDVQIL

SEQ ID NO: 42172 - protein, 10 aa, Artificial Sequence
  Description of Artificial Sequence: Synthetic epitope
RQHVREASIL

SEQ ID NO: 42173 - protein, 10 aa, Artificial Sequence
  Description of Artificial Sequence: Synthetic epitope
RQIAKAMEAT

SEQ ID NO: 42174 - protein, 10 aa, Artificial Sequence
  Description of Artificial Sequence: Synthetic epitope
RQIGKLSHSN

SEQ ID NO: 42175 - protein, 10 aa, Artificial Sequence
  Description of Artificial Sequence: Synthetic epitope
RQIKEQEKAA

SEQ ID NO: 42176 - protein, 10 aa, Artificial Sequence
  Description of Artificial Sequence: Synthetic epitope
RQIKYSKDKM

SEQ ID NO: 42177 - protein, 10 aa, Artificial Sequence
  Description of Artificial Sequence: Synthetic epitope
RQIQQIQPTF

SEQ ID NO: 42178 - protein, 10 aa, Artificial Sequence
  Description of Artificial Sequence: Synthetic epitope
RQISSLRHHQ

SEQ ID NO: 42179 - protein, 10 aa, Artificial Sequence
  Description of Artificial Sequence: Synthetic epitope
RQISSQLSSV

SEQ ID NO: 42180 - protein, 10 aa, Artificial Sequence
  Description of Artificial Sequence: Synthetic epitope
RQITALSSYV

SEQ ID NO: 42181 - protein, 10 aa, Artificial Sequence
  Description of Artificial Sequence: Synthetic epitope
RQIVQVVRST

SEQ ID NO: 42182 - protein, 10 aa, Artificial Sequence
  Description of Artificial Sequence: Synthetic epitope
RQIYASDWVR

SEQ ID NO: 42183 - protein, 10 aa, Artificial Sequence
  Description of Artificial Sequence: Synthetic epitope
RQKAVSTDRT

SEQ ID NO: 42184 - protein, 10 aa, Artificial Sequence
  Description of Artificial Sequence: Synthetic epitope
RQKDVQLQQK

SEQ ID NO: 42185 - protein, 10 aa, Artificial Sequence
  Description of Artificial Sequence: Synthetic epitope
RQKEELLTQQ

SEQ ID NO: 42186 - protein, 10 aa, Artificial Sequence
  Description of Artificial Sequence: Synthetic epitope
RQKKTRLPLE

SEQ ID NO: 42187 - protein, 10 aa, Artificial Sequence
  Description of Artificial Sequence: Synthetic epitope
RQKLADLQKQ

SEQ ID NO: 42188 - protein, 10 aa, Artificial Sequence
  Description of Artificial Sequence: Synthetic epitope
RQKLFALQAE

SEQ ID NO: 42189 - protein, 10 aa, Artificial Sequence
  Description of Artificial Sequence: Synthetic epitope
RQKLTEIRGP

SEQ ID NO: 42190 - protein, 10 aa, Artificial Sequence
  Description of Artificial Sequence: Synthetic epitope
RQKQEVATAD

SEQ ID NO: 42191 - protein, 10 aa, Artificial Sequence
  Description of Artificial Sequence: Synthetic epitope
RQKQLISAAQ

SEQ ID NO: 42192 - protein, 10 aa, Artificial Sequence
  Description of Artificial Sequence: Synthetic epitope
RQKSEQLSRS

SEQ ID NO: 42193 - protein, 10 aa, Artificial Sequence
  Description of Artificial Sequence: Synthetic epitope
RQLAEAKEDN

SEQ ID NO: 42194 - protein, 10 aa, Artificial Sequence
  Description of Artificial Sequence: Synthetic epitope
RQLASEITSK

SEQ ID NO: 42195 - protein, 10 aa, Artificial Sequence
  Description of Artificial Sequence: Synthetic epitope
RQLAVFQRNE

SEQ ID NO: 42196 - protein, 10 aa, Artificial Sequence
  Description of Artificial Sequence: Synthetic epitope
RQLEQRQSRR

SEQ ID NO: 42197 - protein, 10 aa, Artificial Sequence
  Description of Artificial Sequence: Synthetic epitope
RQLESAIEDA

SEQ ID NO: 42198 - protein, 10 aa, Artificial Sequence
  Description of Artificial Sequence: Synthetic epitope
RQLGTESNQV

SEQ ID NO: 42199 - protein, 10 aa, Artificial Sequence
  Description of Artificial Sequence: Synthetic epitope
RQLKGRESQI

SEQ ID NO: 42200 - protein, 10 aa, Artificial Sequence
  Description of Artificial Sequence: Synthetic epitope
RQLKSALSQT

SEQ ID NO: 42201 - protein, 10 aa, Artificial Sequence
  Description of Artificial Sequence: Synthetic epitope
RQLLAAFEQL

SEQ ID NO: 42202 - protein, 10 aa, Artificial Sequence
  Description of Artificial Sequence: Synthetic epitope
RQLMNQSQNE

SEQ ID NO: 42203 - protein, 10 aa, Artificial Sequence
  Description of Artificial Sequence: Synthetic epitope
RQLNLITRFL

SEQ ID NO: 42204 - protein, 10 aa, Artificial Sequence
  Description of Artificial Sequence: Synthetic epitope
RQLNNLADSI

SEQ ID NO: 42205 - protein, 10 aa, Artificial Sequence
  Description of Artificial Sequence: Synthetic epitope
RQLQAESVSE

SEQ ID NO: 42206 - protein, 10 aa, Artificial Sequence
  Description of Artificial Sequence: Synthetic epitope
RQLQTLIAQT

SEQ ID NO: 42207 - protein, 10 aa, Artificial Sequence
  Description of Artificial Sequence: Synthetic epitope
RQLQTLSMPG

SEQ ID NO: 42208 - protein, 10 aa, Artificial Sequence
  Description of Artificial Sequence: Synthetic epitope
RQLRLTQLTE

SEQ ID NO: 42209 - protein, 10 aa, Artificial Sequence
  Description of Artificial Sequence: Synthetic epitope
RQLSADAAVT

SEQ ID NO: 42210 - protein, 10 aa, Artificial Sequence
  Description of Artificial Sequence: Synthetic epitope
RQLSALAEQQ

SEQ ID NO: 42211 - protein, 10 aa, Artificial Sequence
  Description of Artificial Sequence: Synthetic epitope
RQLSISHFKS

SEQ ID NO: 42212 - protein, 10 aa, Artificial Sequence
  Description of Artificial Sequence: Synthetic epitope
RQLTSTVSVK

SEQ ID NO: 42213 - protein, 10 aa, Artificial Sequence
  Description of Artificial Sequence: Synthetic epitope
RQLVAAGVLD

SEQ ID NO: 42214 - protein, 10 aa, Artificial Sequence
  Description of Artificial Sequence: Synthetic epitope
RQLVGLLSPM

SEQ ID NO: 42215 - protein, 10 aa, Artificial Sequence
  Description of Artificial Sequence: Synthetic epitope
RQLVRKMILR

SEQ ID NO: 42216 - protein, 10 aa, Artificial Sequence
  Description of Artificial Sequence: Synthetic epitope
RQMGRQLQQL

SEQ ID NO: 42217 - protein, 10 aa, Artificial Sequence
  Description of Artificial Sequence: Synthetic epitope
RQMKEALFEQ

SEQ ID NO: 42218 - protein, 10 aa, Artificial Sequence
  Description of Artificial Sequence: Synthetic epitope
RQMRSPVKMK

SEQ ID NO: 42219 - protein, 10 aa, Artificial Sequence
  Description of Artificial Sequence: Synthetic epitope
RQMSDEELSQ

SEQ ID NO: 42220 - protein, 10 aa, Artificial Sequence
  Description of Artificial Sequence: Synthetic epitope
RQMVQVSDQD

SEQ ID NO: 42221 - protein, 10 aa, Artificial Sequence
  Description of Artificial Sequence: Synthetic epitope
RQNADSSRIT

SEQ ID NO: 42222 - protein, 10 aa, Artificial Sequence
  Description of Artificial Sequence: Synthetic epitope
RQNDVQIHPQ

SEQ ID NO: 42223 - protein, 10 aa, Artificial Sequence
  Description of Artificial Sequence: Synthetic epitope
RQNLDALLNQ

SEQ ID NO: 42224 - protein, 10 aa, Artificial Sequence
  Description of Artificial Sequence: Synthetic epitope
RQNQRSMFDH

SEQ ID NO: 42225 - protein, 10 aa, Artificial Sequence
  Description of Artificial Sequence: Synthetic epitope
RQNRIITKTD

SEQ ID NO: 42226 - protein, 10 aa, Artificial Sequence
  Description of Artificial Sequence: Synthetic epitope
RQNSEGSASK

SEQ ID NO: 42227 - protein, 10 aa, Artificial Sequence
  Description of Artificial Sequence: Synthetic epitope
RQNTKQKTSS

SEQ ID NO: 42228 - protein, 10 aa, Artificial Sequence
  Description of Artificial Sequence: Synthetic epitope
RQNVAYNREE

SEQ ID NO: 42229 - protein, 10 aa, Artificial Sequence
  Description of Artificial Sequence: Synthetic epitope
RQNVSSLFLP

SEQ ID NO: 42230 - protein, 10 aa, Artificial Sequence
  Description of Artificial Sequence: Synthetic epitope
RQNYSSNAYH

SEQ ID NO: 42231 - protein, 10 aa, Artificial Sequence
  Description of Artificial Sequence: Synthetic epitope
RQPESKTKLS

SEQ ID NO: 42232 - protein, 10 aa, Artificial Sequence
  Description of Artificial Sequence: Synthetic epitope
RQPETVLTET

SEQ ID NO: 42233 - protein, 10 aa, Artificial Sequence
  Description of Artificial Sequence: Synthetic epitope
RQPIQMIVLT

SEQ ID NO: 42234 - protein, 10 aa, Artificial Sequence
  Description of Artificial Sequence: Synthetic epitope
RQPLKKTVQR

SEQ ID NO: 42235 - protein, 10 aa, Artificial Sequence
  Description of Artificial Sequence: Synthetic epitope
RQPPLSSQRP

SEQ ID NO: 42236 - protein, 10 aa, Artificial Sequence
  Description of Artificial Sequence: Synthetic epitope
RQPRESRKEK

SEQ ID NO: 42237 - protein, 10 aa, Artificial Sequence
  Description of Artificial Sequence: Synthetic epitope
RQPVILWKEM

SEQ ID NO: 42238 - protein, 10 aa, Artificial Sequence
  Description of Artificial Sequence: Synthetic epitope
RQQAEIKDTT

SEQ ID NO: 42239 - protein, 10 aa, Artificial Sequence
  Description of Artificial Sequence: Synthetic epitope
RQQAQIRHQM

SEQ ID NO: 42240 - protein, 10 aa, Artificial Sequence
  Description of Artificial Sequence: Synthetic epitope
RQQARKTASV

SEQ ID NO: 42241 - protein, 10 aa, Artificial Sequence
  Description of Artificial Sequence: Synthetic epitope
RQQDIGLKTH

SEQ ID NO: 42242 - protein, 10 aa, Artificial Sequence
  Description of Artificial Sequence: Synthetic epitope
RQQDRNIPRG

SEQ ID NO: 42243 - protein, 10 aa, Artificial Sequence
  Description of Artificial Sequence: Synthetic epitope
RQQEAMREPR

SEQ ID NO: 42244 - protein, 10 aa, Artificial Sequence
  Description of Artificial Sequence: Synthetic epitope
RQQEGGSQAS

SEQ ID NO: 42245 - protein, 10 aa, Artificial Sequence
  Description of Artificial Sequence: Synthetic epitope
RQQESAKSAT

SEQ ID NO: 42246 - protein, 10 aa, Artificial Sequence
  Description of Artificial Sequence: Synthetic epitope
RQQGITDEKT

SEQ ID NO: 42247 - protein, 10 aa, Artificial Sequence
  Description of Artificial Sequence: Synthetic epitope
RQQGLSLLQV

SEQ ID NO: 42248 - protein, 10 aa, Artificial Sequence
  Description of Artificial Sequence: Synthetic epitope
RQQHARMQQH

SEQ ID NO: 42249 - protein, 10 aa, Artificial Sequence
  Description of Artificial Sequence: Synthetic epitope
RQQITEKEEK

SEQ ID NO: 42250 - protein, 10 aa, Artificial Sequence
  Description of Artificial Sequence: Synthetic epitope
RQQKHLSDAI

SEQ ID NO: 42251 - protein, 10 aa, Artificial Sequence
  Description of Artificial Sequence: Synthetic epitope
RQQKLKQAKL

SEQ ID NO: 42252 - protein, 10 aa, Artificial Sequence
  Description of Artificial Sequence: Synthetic epitope
RQQLRAVKEE

SEQ ID NO: 42253 - protein, 10 aa, Artificial Sequence
  Description of Artificial Sequence: Synthetic epitope
RQQMTALQSQ

SEQ ID NO: 42254 - protein, 10 aa, Artificial Sequence
  Description of Artificial Sequence: Synthetic epitope
RQQNVERLSE

SEQ ID NO: 42255 - protein, 10 aa, Artificial Sequence
  Description of Artificial Sequence: Synthetic epitope
RQQSAQSQVS

SEQ ID NO: 42256 - protein, 10 aa, Artificial Sequence
  Description of Artificial Sequence: Synthetic epitope
RQQSLSKEGS

SEQ ID NO: 42257 - protein, 10 aa, Artificial Sequence
  Description of Artificial Sequence: Synthetic epitope
RQQVMKTSQL

SEQ ID NO: 42258 - protein, 10 aa, Artificial Sequence
  Description of Artificial Sequence: Synthetic epitope
RQQVYISHLG

SEQ ID NO: 42259 - protein, 10 aa, Artificial Sequence
  Description of Artificial Sequence: Synthetic epitope
RQQWMANQSE

SEQ ID NO: 42260 - protein, 10 aa, Artificial Sequence
  Description of Artificial Sequence: Synthetic epitope
RQQYVGKVKF

SEQ ID NO: 42261 - protein, 10 aa, Artificial Sequence
  Description of Artificial Sequence: Synthetic epitope
RQRAASESTE

SEQ ID NO: 42262 - protein, 10 aa, Artificial Sequence
  Description of Artificial Sequence: Synthetic epitope
RQRAIMLLEG

SEQ ID NO: 42263 - protein, 10 aa, Artificial Sequence
  Description of Artificial Sequence: Synthetic epitope
RQRAPSSKQV

SEQ ID NO: 42264 - protein, 10 aa, Artificial Sequence
  Description of Artificial Sequence: Synthetic epitope
RQREDTEKAQ

SEQ ID NO: 42265 - protein, 10 aa, Artificial Sequence
  Description of Artificial Sequence: Synthetic epitope
RQRGEKTKAR

SEQ ID NO: 42266 - protein, 10 aa, Artificial Sequence
  Description of Artificial Sequence: Synthetic epitope
RQRGVGQQAM

SEQ ID NO: 42267 - protein, 10 aa, Artificial Sequence
  Description of Artificial Sequence: Synthetic epitope
RQRHDDTRVH

SEQ ID NO: 42268 - protein, 10 aa, Artificial Sequence
  Description of Artificial Sequence: Synthetic epitope
RQRHDDTRVH

SEQ ID NO: 42269 - protein, 10 aa, Artificial Sequence
  Description of Artificial Sequence: Synthetic epitope
RQRLEVIAEK

SEQ ID NO: 42270 - protein, 10 aa, Artificial Sequence
  Description of Artificial Sequence: Synthetic epitope
RQRPDMNILF

SEQ ID NO: 42271 - protein, 10 aa, Artificial Sequence
  Description of Artificial Sequence: Synthetic epitope
RQRQAEQEAT

SEQ ID NO: 42272 - protein, 10 aa, Artificial Sequence
  Description of Artificial Sequence: Synthetic epitope
RQRRLVRSQV

SEQ ID NO: 42273 - protein, 10 aa, Artificial Sequence
  Description of Artificial Sequence: Synthetic epitope
RQRSLSSLEL

SEQ ID NO: 42274 - protein, 10 aa, Artificial Sequence
  Description of Artificial Sequence: Synthetic epitope
RQRVDAAVAQ

SEQ ID NO: 42275 - protein, 10 aa, Artificial Sequence
  Description of Artificial Sequence: Synthetic epitope
RQRVSRSDSQ

SEQ ID NO: 42276 - protein, 10 aa, Artificial Sequence
  Description of Artificial Sequence: Synthetic epitope
RQSDQINWES

SEQ ID NO: 42277 - protein, 10 aa, Artificial Sequence
  Description of Artificial Sequence: Synthetic epitope
RQSETSTQSQ

SEQ ID NO: 42278 - protein, 10 aa, Artificial Sequence
  Description of Artificial Sequence: Synthetic epitope
RQSGRLKLEK

SEQ ID NO: 42279 - protein, 10 aa, Artificial Sequence
  Description of Artificial Sequence: Synthetic epitope
RQSIDKSEAS

SEQ ID NO: 42280 - protein, 10 aa, Artificial Sequence
  Description of Artificial Sequence: Synthetic epitope
RQSIDKSEAS

SEQ ID NO: 42281 - protein, 10 aa, Artificial Sequence
  Description of Artificial Sequence: Synthetic epitope
RQSIKQQGAS

SEQ ID NO: 42282 - protein, 10 aa, Artificial Sequence
  Description of Artificial Sequence: Synthetic epitope
RQSLADTTKP

SEQ ID NO: 42283 - protein, 10 aa, Artificial Sequence
  Description of Artificial Sequence: Synthetic epitope
RQSLEVVAKV

SEQ ID NO: 42284 - protein, 10 aa, Artificial Sequence
  Description of Artificial Sequence: Synthetic epitope
RQSMEARGKL

SEQ ID NO: 42285 - protein, 10 aa, Artificial Sequence
  Description of Artificial Sequence: Synthetic epitope
RQSRQASDAP

SEQ ID NO: 42286 - protein, 10 aa, Artificial Sequence
  Description of Artificial Sequence: Synthetic epitope
RQSRSSRKAV

SEQ ID NO: 42287 - protein, 10 aa, Artificial Sequence
  Description of Artificial Sequence: Synthetic epitope
RQSSARRTEK

SEQ ID NO: 42288 - protein, 10 aa, Artificial Sequence
  Description of Artificial Sequence: Synthetic epitope
RQSSPSTNAA

SEQ ID NO: 42289 - protein, 10 aa, Artificial Sequence
  Description of Artificial Sequence: Synthetic epitope
RQSSVLSQAS

SEQ ID NO: 42290 - protein, 10 aa, Artificial Sequence
  Description of Artificial Sequence: Synthetic epitope
RQSSVTVTES

SEQ ID NO: 42291 - protein, 10 aa, Artificial Sequence
  Description of Artificial Sequence: Synthetic epitope
RQSTAKIQIV

SEQ ID NO: 42292 - protein, 10 aa, Artificial Sequence
  Description of Artificial Sequence: Synthetic epitope
RQSTQLAAHH

SEQ ID NO: 42293 - protein, 10 aa, Artificial Sequence
  Description of Artificial Sequence: Synthetic epitope
RQSTRESVHY

SEQ ID NO: 42294 - protein, 10 aa, Artificial Sequence
  Description of Artificial Sequence: Synthetic epitope
RQSTRTADEA

SEQ ID NO: 42295 - protein, 10 aa, Artificial Sequence
  Description of Artificial Sequence: Synthetic epitope
RQTERQQRYL

SEQ ID NO: 42296 - protein, 10 aa, Artificial Sequence
  Description of Artificial Sequence: Synthetic epitope
RQTFEAAILT

SEQ ID NO: 42297 - protein, 10 aa, Artificial Sequence
  Description of Artificial Sequence: Synthetic epitope
RQTFENQVNR

SEQ ID NO: 42298 - protein, 10 aa, Artificial Sequence
  Description of Artificial Sequence: Synthetic epitope
RQTGHQRLKA

SEQ ID NO: 42299 - protein, 10 aa, Artificial Sequence
  Description of Artificial Sequence: Synthetic epitope
RQTHTGTDMA

SEQ ID NO: 42300 - protein, 10 aa, Artificial Sequence
  Description of Artificial Sequence: Synthetic epitope
RQTIAEQESK

SEQ ID NO: 42301 - protein, 10 aa, Artificial Sequence
  Description of Artificial Sequence: Synthetic epitope
RQTKLEEGVL

SEQ ID NO: 42302 - protein, 10 aa, Artificial Sequence
  Description of Artificial Sequence: Synthetic epitope
RQTLTESMLE

SEQ ID NO: 42303 - protein, 10 aa, Artificial Sequence
  Description of Artificial Sequence: Synthetic epitope
RQTQAGLESA

SEQ ID NO: 42304 - protein, 10 aa, Artificial Sequence
  Description of Artificial Sequence: Synthetic epitope
RQTQALADQF

SEQ ID NO: 42305 - protein, 10 aa, Artificial Sequence
  Description of Artificial Sequence: Synthetic epitope
RQTQALHQRL

SEQ ID NO: 42306 - protein, 10 aa, Artificial Sequence
  Description of Artificial Sequence: Synthetic epitope
RQTRIMDSAQ

SEQ ID NO: 42307 - protein, 10 aa, Artificial Sequence
  Description of Artificial Sequence: Synthetic epitope
RQTSATSTTM

SEQ ID NO: 42308 - protein, 10 aa, Artificial Sequence
  Description of Artificial Sequence: Synthetic epitope
RQTSKGEDVG

SEQ ID NO: 42309 - protein, 10 aa, Artificial Sequence
  Description of Artificial Sequence: Synthetic epitope
RQTTAAELDS

SEQ ID NO: 42310 - protein, 10 aa, Artificial Sequence
  Description of Artificial Sequence: Synthetic epitope
RQTVAVGVIK

SEQ ID NO: 42311 - protein, 10 aa, Artificial Sequence
  Description of Artificial Sequence: Synthetic epitope
RQTWAQQEHQ

SEQ ID NO: 42312 - protein, 10 aa, Artificial Sequence
  Description of Artificial Sequence: Synthetic epitope
RQVAESSTSH

SEQ ID NO: 42313 - protein, 10 aa, Artificial Sequence
  Description of Artificial Sequence: Synthetic epitope
RQVANMMIRM

SEQ ID NO: 42314 - protein, 10 aa, Artificial Sequence
  Description of Artificial Sequence: Synthetic epitope
RQVEARVSTL

SEQ ID NO: 42315 - protein, 10 aa, Artificial Sequence
  Description of Artificial Sequence: Synthetic epitope
RQVEQELRSQ

SEQ ID NO: 42316 - protein, 10 aa, Artificial Sequence
  Description of Artificial Sequence: Synthetic epitope
RQVESTQSMI

SEQ ID NO: 42317 - protein, 10 aa, Artificial Sequence
  Description of Artificial Sequence: Synthetic epitope
RQVEVLTNQR

SEQ ID NO: 42318 - protein, 10 aa, Artificial Sequence
  Description of Artificial Sequence: Synthetic epitope
RQVIASDLII

SEQ ID NO: 42319 - protein, 10 aa, Artificial Sequence
  Description of Artificial Sequence: Synthetic epitope
RQVQDARTSQ

SEQ ID NO: 42320 - protein, 10 aa, Artificial Sequence
  Description of Artificial Sequence: Synthetic epitope
RQVQLSQGQN

SEQ ID NO: 42321 - protein, 10 aa, Artificial Sequence
  Description of Artificial Sequence: Synthetic epitope
RQVQSILTQS

SEQ ID NO: 42322 - protein, 10 aa, Artificial Sequence
  Description of Artificial Sequence: Synthetic epitope
RQVRQTQGQK

SEQ ID NO: 42323 - protein, 10 aa, Artificial Sequence
  Description of Artificial Sequence: Synthetic epitope
RQVSNSKLPV

SEQ ID NO: 42324 - protein, 10 aa, Artificial Sequence
  Description of Artificial Sequence: Synthetic epitope
RQVTLEVSGA

SEQ ID NO: 42325 - protein, 10 aa, Artificial Sequence
  Description of Artificial Sequence: Synthetic epitope
RQVTMLPAKQ

SEQ ID NO: 42326 - protein, 10 aa, Artificial Sequence
  Description of Artificial Sequence: Synthetic epitope
RQVTSLLRRV

SEQ ID NO: 42327 - protein, 10 aa, Artificial Sequence
  Description of Artificial Sequence: Synthetic epitope
RQVTVISRET

SEQ ID NO: 42328 - protein, 10 aa, Artificial Sequence
  Description of Artificial Sequence: Synthetic epitope
RQWAGLVEKV

SEQ ID NO: 42329 - protein, 10 aa, Artificial Sequence
  Description of Artificial Sequence: Synthetic epitope
RQYASRVPRQ

SEQ ID NO: 42330 - protein, 10 aa, Artificial Sequence
  Description of Artificial Sequence: Synthetic epitope
RQYEQQTYQV

SEQ ID NO: 42331 - protein, 10 aa, Artificial Sequence
  Description of Artificial Sequence: Synthetic epitope
RQYGVSVTKT

SEQ ID NO: 42332 - protein, 10 aa, Artificial Sequence
  Description of Artificial Sequence: Synthetic epitope
RQYMGVSKRK

SEQ ID NO: 42333 - protein, 10 aa, Artificial Sequence
  Description of Artificial Sequence: Synthetic epitope
RQYQKRIAQQ

SEQ ID NO: 42334 - protein, 10 aa, Artificial Sequence
  Description of Artificial Sequence: Synthetic epitope
RQYQSIVPAL

SEQ ID NO: 42335 - protein, 10 aa, Artificial Sequence
  Description of Artificial Sequence: Synthetic epitope
RRAARQLAES

SEQ ID NO: 42336 - protein, 10 aa, Artificial Sequence
  Description of Artificial Sequence: Synthetic epitope
RRAASHEESE

SEQ ID NO: 42337 - protein, 10 aa, Artificial Sequence
  Description of Artificial Sequence: Synthetic epitope
RRADAAEALF

SEQ ID NO: 42338 - protein, 10 aa, Artificial Sequence
  Description of Artificial Sequence: Synthetic epitope
RRAEARSQSL

SEQ ID NO: 42339 - protein, 10 aa, Artificial Sequence
  Description of Artificial Sequence: Synthetic epitope
RRAELDYRKA

SEQ ID NO: 42340 - protein, 10 aa, Artificial Sequence
  Description of Artificial Sequence: Synthetic epitope
RRAIGKSRPY

SEQ ID NO: 42341 - protein, 10 aa, Artificial Sequence
  Description of Artificial Sequence: Synthetic epitope
RRAISEANED

SEQ ID NO: 42342 - protein, 10 aa, Artificial Sequence
  Description of Artificial Sequence: Synthetic epitope
RRAKEDQALL

SEQ ID NO: 42343 - protein, 10 aa, Artificial Sequence
  Description of Artificial Sequence: Synthetic epitope
RRAKSSTATH

SEQ ID NO: 42344 - protein, 10 aa, Artificial Sequence
  Description of Artificial Sequence: Synthetic epitope
RRAKTARGLR

SEQ ID NO: 42345 - protein, 10 aa, Artificial Sequence
  Description of Artificial Sequence: Synthetic epitope
RRALARAASD

SEQ ID NO: 42346 - protein, 10 aa, Artificial Sequence
  Description of Artificial Sequence: Synthetic epitope
RRALKARSKS

SEQ ID NO: 42347 - protein, 10 aa, Artificial Sequence
  Description of Artificial Sequence: Synthetic epitope
RRALLRKASS

SEQ ID NO: 42348 - protein, 10 aa, Artificial Sequence
  Description of Artificial Sequence: Synthetic epitope
RRAMQAALDS

SEQ ID NO: 42349 - protein, 10 aa, Artificial Sequence
  Description of Artificial Sequence: Synthetic epitope
RRANSVQASR

SEQ ID NO: 42350 - protein, 10 aa, Artificial Sequence
  Description of Artificial Sequence: Synthetic epitope
RRAQATAQDP

SEQ ID NO: 42351 - protein, 10 aa, Artificial Sequence
  Description of Artificial Sequence: Synthetic epitope
RRAQMQIDKI

SEQ ID NO: 42352 - protein, 10 aa, Artificial Sequence
  Description of Artificial Sequence: Synthetic epitope
RRARALKKLA

SEQ ID NO: 42353 - protein, 10 aa, Artificial Sequence
  Description of Artificial Sequence: Synthetic epitope
RRARDKALSG

SEQ ID NO: 42354 - protein, 10 aa, Artificial Sequence
  Description of Artificial Sequence: Synthetic epitope
RRARYIVKNP

SEQ ID NO: 42355 - protein, 10 aa, Artificial Sequence
  Description of Artificial Sequence: Synthetic epitope
RRASKSSRPM

SEQ ID NO: 42356 - protein, 10 aa, Artificial Sequence
  Description of Artificial Sequence: Synthetic epitope
RRASNKSTEA

SEQ ID NO: 42357 - protein, 10 aa, Artificial Sequence
  Description of Artificial Sequence: Synthetic epitope
RRASSKASDL

SEQ ID NO: 42358 - protein, 10 aa, Artificial Sequence
  Description of Artificial Sequence: Synthetic epitope
RRASSLSRDA

SEQ ID NO: 42359 - protein, 10 aa, Artificial Sequence
  Description of Artificial Sequence: Synthetic epitope
RRASSVLAQR

SEQ ID NO: 42360 - protein, 10 aa, Artificial Sequence
  Description of Artificial Sequence: Synthetic epitope
RRASVSARAT

SEQ ID NO: 42361 - protein, 10 aa, Artificial Sequence
  Description of Artificial Sequence: Synthetic epitope
RRATAKYRTA

SEQ ID NO: 42362 - protein, 10 aa, Artificial Sequence
  Description of Artificial Sequence: Synthetic epitope
RRATLKENEQ

SEQ ID NO: 42363 - protein, 10 aa, Artificial Sequence
  Description of Artificial Sequence: Synthetic epitope
RRATSQKASK

SEQ ID NO: 42364 - protein, 10 aa, Artificial Sequence
  Description of Artificial Sequence: Synthetic epitope
RRATVAAGNS

SEQ ID NO: 42365 - protein, 10 aa, Artificial Sequence
  Description of Artificial Sequence: Synthetic epitope
RRAVEFRDSS

SEQ ID NO: 42366 - protein, 10 aa, Artificial Sequence
  Description of Artificial Sequence: Synthetic epitope
RRDALSAAKE

SEQ ID NO: 42367 - protein, 10 aa, Artificial Sequence
  Description of Artificial Sequence: Synthetic epitope
RRDLRIKSQE

SEQ ID NO: 42368 - protein, 10 aa, Artificial Sequence
  Description of Artificial Sequence: Synthetic epitope
RRDSIRQRSM

SEQ ID NO: 42369 - protein, 10 aa, Artificial Sequence
  Description of Artificial Sequence: Synthetic epitope
RRDVLITQMG

SEQ ID NO: 42370 - protein, 10 aa, Artificial Sequence
  Description of Artificial Sequence: Synthetic epitope
RREAAEAEAE

SEQ ID NO: 42371 - protein, 10 aa, Artificial Sequence
  Description of Artificial Sequence: Synthetic epitope
RREAGKDRSS

SEQ ID NO: 42372 - protein, 10 aa, Artificial Sequence
  Description of Artificial Sequence: Synthetic epitope
RREAMAATID

SEQ ID NO: 42373 - protein, 10 aa, Artificial Sequence
  Description of Artificial Sequence: Synthetic epitope
RREAMVGTID

SEQ ID NO: 42374 - protein, 10 aa, Artificial Sequence
  Description of Artificial Sequence: Synthetic epitope
RREAQKLTEM

SEQ ID NO: 42375 - protein, 10 aa, Artificial Sequence
  Description of Artificial Sequence: Synthetic epitope
RREAQRTQQP

SEQ ID NO: 42376 - protein, 10 aa, Artificial Sequence
  Description of Artificial Sequence: Synthetic epitope
RREKEIAETR

SEQ ID NO: 42377 - protein, 10 aa, Artificial Sequence
  Description of Artificial Sequence: Synthetic epitope
RREKTTSTPD

SEQ ID NO: 42378 - protein, 10 aa, Artificial Sequence
  Description of Artificial Sequence: Synthetic epitope
RRELAQSQEA

SEQ ID NO: 42379 - protein, 10 aa, Artificial Sequence
  Description of Artificial Sequence: Synthetic epitope
RRELDNRNME

SEQ ID NO: 42380 - protein, 10 aa, Artificial Sequence
  Description of Artificial Sequence: Synthetic epitope
RRELKALRIE

SEQ ID NO: 42381 - protein, 10 aa, Artificial Sequence
  Description of Artificial Sequence: Synthetic epitope
RRELVASQEK

SEQ ID NO: 42382 - protein, 10 aa, Artificial Sequence
  Description of Artificial Sequence: Synthetic epitope
RREMVAQQHR

SEQ ID NO: 42383 - protein, 10 aa, Artificial Sequence
  Description of Artificial Sequence: Synthetic epitope
RREPHISTLR

SEQ ID NO: 42384 - protein, 10 aa, Artificial Sequence
  Description of Artificial Sequence: Synthetic epitope
RREPIQASTA

SEQ ID NO: 42385 - protein, 10 aa, Artificial Sequence
  Description of Artificial Sequence: Synthetic epitope
RREQANNILA

SEQ ID NO: 42386 - protein, 10 aa, Artificial Sequence
  Description of Artificial Sequence: Synthetic epitope
RRERDDQMYR

SEQ ID NO: 42387 - protein, 10 aa, Artificial Sequence
  Description of Artificial Sequence: Synthetic epitope
RRERRTLSVG

SEQ ID NO: 42388 - protein, 10 aa, Artificial Sequence
  Description of Artificial Sequence: Synthetic epitope
RRESLAEEHE

SEQ ID NO: 42389 - protein, 10 aa, Artificial Sequence
  Description of Artificial Sequence: Synthetic epitope
RRESVNLGKS

SEQ ID NO: 42390 - protein, 10 aa, Artificial Sequence
  Description of Artificial Sequence: Synthetic epitope
RRETLNAKEI

SEQ ID NO: 42391 - protein, 10 aa, Artificial Sequence
  Description of Artificial Sequence: Synthetic epitope
RREVESQAQQ

SEQ ID NO: 42392 - protein, 10 aa, Artificial Sequence
  Description of Artificial Sequence: Synthetic epitope
RREVWEMELD

SEQ ID NO: 42393 - protein, 10 aa, Artificial Sequence
  Description of Artificial Sequence: Synthetic epitope
RRFLSLSAAD

SEQ ID NO: 42394 - protein, 10 aa, Artificial Sequence
  Description of Artificial Sequence: Synthetic epitope
RRFSQLSELP

SEQ ID NO: 42395 - protein, 10 aa, Artificial Sequence
  Description of Artificial Sequence: Synthetic epitope
RRFSSEAAES

SEQ ID NO: 42396 - protein, 10 aa, Artificial Sequence
  Description of Artificial Sequence: Synthetic epitope
RRGERVSMAE

SEQ ID NO: 42397 - protein, 10 aa, Artificial Sequence
  Description of Artificial Sequence: Synthetic epitope
RRGLQAIPLS

SEQ ID NO: 42398 - protein, 10 aa, Artificial Sequence
  Description of Artificial Sequence: Synthetic epitope
RRGRLNSASR

SEQ ID NO: 42399 - protein, 10 aa, Artificial Sequence
  Description of Artificial Sequence: Synthetic epitope
RRGSISSGVS

SEQ ID NO: 42400 - protein, 10 aa, Artificial Sequence
  Description of Artificial Sequence: Synthetic epitope
RRGVKLKKTT

SEQ ID NO: 42401 - protein, 10 aa, Artificial Sequence
  Description of Artificial Sequence: Synthetic epitope
RRHDAQQLQQ

SEQ ID NO: 42402 - protein, 10 aa, Artificial Sequence
  Description of Artificial Sequence: Synthetic epitope
RRHLVTFRAM

SEQ ID NO: 42403 - protein, 10 aa, Artificial Sequence
  Description of Artificial Sequence: Synthetic epitope
RRIAKMLFAT

SEQ ID NO: 42404 - protein, 10 aa, Artificial Sequence
  Description of Artificial Sequence: Synthetic epitope
RRIEESAIDE

SEQ ID NO: 42405 - protein, 10 aa, Artificial Sequence
  Description of Artificial Sequence: Synthetic epitope
RRIGENLNAS

SEQ ID NO: 42406 - protein, 10 aa, Artificial Sequence
  Description of Artificial Sequence: Synthetic epitope
RRIGVKNASP

SEQ ID NO: 42407 - protein, 10 aa, Artificial Sequence
  Description of Artificial Sequence: Synthetic epitope
RRIIVKNNAK

SEQ ID NO: 42408 - protein, 10 aa, Artificial Sequence
  Description of Artificial Sequence: Synthetic epitope
RRIKAIVEVA

SEQ ID NO: 42409 - protein, 10 aa, Artificial Sequence
  Description of Artificial Sequence: Synthetic epitope
RRIKMATADE

SEQ ID NO: 42410 - protein, 10 aa, Artificial Sequence
  Description of Artificial Sequence: Synthetic epitope
RRIKNWMAQN

SEQ ID NO: 42411 - protein, 10 aa, Artificial Sequence
  Description of Artificial Sequence: Synthetic epitope
RRIKVQEDSS

SEQ ID NO: 42412 - protein, 10 aa, Artificial Sequence
  Description of Artificial Sequence: Synthetic epitope
RRINSSVTTE

SEQ ID NO: 42413 - protein, 10 aa, Artificial Sequence
  Description of Artificial Sequence: Synthetic epitope
RRIPSEEASQ

SEQ ID NO: 42414 - protein, 10 aa, Artificial Sequence
  Description of Artificial Sequence: Synthetic epitope
RRIQSNYMAL

SEQ ID NO: 42415 - protein, 10 aa, Artificial Sequence
  Description of Artificial Sequence: Synthetic epitope
RRISETDLRP

SEQ ID NO: 42416 - protein, 10 aa, Artificial Sequence
  Description of Artificial Sequence: Synthetic epitope
RRISKQLPQL

SEQ ID NO: 42417 - protein, 10 aa, Artificial Sequence
  Description of Artificial Sequence: Synthetic epitope
RRKDDAQQRS

SEQ ID NO: 42418 - protein, 10 aa, Artificial Sequence
  Description of Artificial Sequence: Synthetic epitope
RRKDSVSTFS

SEQ ID NO: 42419 - protein, 10 aa, Artificial Sequence
  Description of Artificial Sequence: Synthetic epitope
RRKETSTAEM

SEQ ID NO: 42420 - protein, 10 aa, Artificial Sequence
  Description of Artificial Sequence: Synthetic epitope
RRKIMKRPSS

SEQ ID NO: 42421 - protein, 10 aa, Artificial Sequence
  Description of Artificial Sequence: Synthetic epitope
RRKKMKLQGQ

SEQ ID NO: 42422 - protein, 10 aa, Artificial Sequence
  Description of Artificial Sequence: Synthetic epitope
RRKMEGTSIN

SEQ ID NO: 42423 - protein, 10 aa, Artificial Sequence
  Description of Artificial Sequence: Synthetic epitope
RRKMSQKGKR

SEQ ID NO: 42424 - protein, 10 aa, Artificial Sequence
  Description of Artificial Sequence: Synthetic epitope
RRKPAMTTPT

SEQ ID NO: 42425 - protein, 10 aa, Artificial Sequence
  Description of Artificial Sequence: Synthetic epitope
RRKRESVAKM

SEQ ID NO: 42426 - protein, 10 aa, Artificial Sequence
  Description of Artificial Sequence: Synthetic epitope
RRKRKVTTNK

SEQ ID NO: 42427 - protein, 10 aa, Artificial Sequence
  Description of Artificial Sequence: Synthetic epitope
RRKSKAKARD

SEQ ID NO: 42428 - protein, 10 aa, Artificial Sequence
  Description of Artificial Sequence: Synthetic epitope
RRKSSKTFNL

SEQ ID NO: 42429 - protein, 10 aa, Artificial Sequence
  Description of Artificial Sequence: Synthetic epitope
RRKTKSKSIA

SEQ ID NO: 42430 - protein, 10 aa, Artificial Sequence
  Description of Artificial Sequence: Synthetic epitope
RRKVKRAKGN

SEQ ID NO: 42431 - protein, 10 aa, Artificial Sequence
  Description of Artificial Sequence: Synthetic epitope
RRKVKRVTSE

SEQ ID NO: 42432 - protein, 10 aa, Artificial Sequence
  Description of Artificial Sequence: Synthetic epitope
RRKVLSRAVA

SEQ ID NO: 42433 - protein, 10 aa, Artificial Sequence
  Description of Artificial Sequence: Synthetic epitope
RRKVSIANML

SEQ ID NO: 42434 - protein, 10 aa, Artificial Sequence
  Description of Artificial Sequence: Synthetic epitope
RRLAESSKQD

SEQ ID NO: 42435 - protein, 10 aa, Artificial Sequence
  Description of Artificial Sequence: Synthetic epitope
RRLALQLDGV

SEQ ID NO: 42436 - protein, 10 aa, Artificial Sequence
  Description of Artificial Sequence: Synthetic epitope
RRLASVASKL

SEQ ID NO: 42437 - protein, 10 aa, Artificial Sequence
  Description of Artificial Sequence: Synthetic epitope
RRLFSKNRRE

SEQ ID NO: 42438 - protein, 10 aa, Artificial Sequence
  Description of Artificial Sequence: Synthetic epitope
RRLGFATSSD

SEQ ID NO: 42439 - protein, 10 aa, Artificial Sequence
  Description of Artificial Sequence: Synthetic epitope
RRLGSSQVAS

SEQ ID NO: 42440 - protein, 10 aa, Artificial Sequence
  Description of Artificial Sequence: Synthetic epitope
RRLGSTSSNS

SEQ ID NO: 42441 - protein, 10 aa, Artificial Sequence
  Description of Artificial Sequence: Synthetic epitope
RRLKATVSEQ

SEQ ID NO: 42442 - protein, 10 aa, Artificial Sequence
  Description of Artificial Sequence: Synthetic epitope
RRLKNTVRQP

SEQ ID NO: 42443 - protein, 10 aa, Artificial Sequence
  Description of Artificial Sequence: Synthetic epitope
RRLKSIKNIQ

SEQ ID NO: 42444 - protein, 10 aa, Artificial Sequence
  Description of Artificial Sequence: Synthetic epitope
RRLKSSIKRT

SEQ ID NO: 42445 - protein, 10 aa, Artificial Sequence
  Description of Artificial Sequence: Synthetic epitope
RRLKVSSKVQ

SEQ ID NO: 42446 - protein, 10 aa, Artificial Sequence
  Description of Artificial Sequence: Synthetic epitope
RRLLKKTMSG

SEQ ID NO: 42447 - protein, 10 aa, Artificial Sequence
  Description of Artificial Sequence: Synthetic epitope
RRLQAKMMTN

SEQ ID NO: 42448 - protein, 10 aa, Artificial Sequence
  Description of Artificial Sequence: Synthetic epitope
RRLQARALAE

SEQ ID NO: 42449 - protein, 10 aa, Artificial Sequence
  Description of Artificial Sequence: Synthetic epitope
RRLQKLESPV

SEQ ID NO: 42450 - protein, 10 aa, Artificial Sequence
  Description of Artificial Sequence: Synthetic epitope
RRLQSSLQSQ

SEQ ID NO: 42451 - protein, 10 aa, Artificial Sequence
  Description of Artificial Sequence: Synthetic epitope
RRLRVVLKAV

SEQ ID NO: 42452 - protein, 10 aa, Artificial Sequence
  Description of Artificial Sequence: Synthetic epitope
RRLTLAGARA

SEQ ID NO: 42453 - protein, 10 aa, Artificial Sequence
  Description of Artificial Sequence: Synthetic epitope
RRLVESTEVE

SEQ ID NO: 42454 - protein, 10 aa, Artificial Sequence
  Description of Artificial Sequence: Synthetic epitope
RRMAKARASS

SEQ ID NO: 42455 - protein, 10 aa, Artificial Sequence
  Description of Artificial Sequence: Synthetic epitope
RRMGYIQGDS

SEQ ID NO: 42456 - protein, 10 aa, Artificial Sequence
  Description of Artificial Sequence: Synthetic epitope
RRMLTDKERE

SEQ ID NO: 42457 - protein, 10 aa, Artificial Sequence
  Description of Artificial Sequence: Synthetic epitope
RRMQDEPYQA

SEQ ID NO: 42458 - protein, 10 aa, Artificial Sequence
  Description of Artificial Sequence: Synthetic epitope
RRMQSSADLI

SEQ ID NO: 42459 - protein, 10 aa, Artificial Sequence
  Description of Artificial Sequence: Synthetic epitope
RRMSRLKGEI

SEQ ID NO: 42460 - protein, 10 aa, Artificial Sequence
  Description of Artificial Sequence: Synthetic epitope
RRMTAAQPSE

SEQ ID NO: 42461 - protein, 10 aa, Artificial Sequence
  Description of Artificial Sequence: Synthetic epitope
RRMVPYKGSG

SEQ ID NO: 42462 - protein, 10 aa, Artificial Sequence
  Description of Artificial Sequence: Synthetic epitope
RRNAAESSNG

SEQ ID NO: 42463 - protein, 10 aa, Artificial Sequence
  Description of Artificial Sequence: Synthetic epitope
RRNARAAEEN

SEQ ID NO: 42464 - protein, 10 aa, Artificial Sequence
  Description of Artificial Sequence: Synthetic epitope
RRNGITKMEE

SEQ ID NO: 42465 - protein, 10 aa, Artificial Sequence
  Description of Artificial Sequence: Synthetic epitope
RRNKGMRTRL

SEQ ID NO: 42466 - protein, 10 aa, Artificial Sequence
  Description of Artificial Sequence: Synthetic epitope
RRNSALEVTF

SEQ ID NO: 42467 - protein, 10 aa, Artificial Sequence
  Description of Artificial Sequence: Synthetic epitope
RRNSKSASAT

SEQ ID NO: 42468 - protein, 10 aa, Artificial Sequence
  Description of Artificial Sequence: Synthetic epitope
RRNSRPSVVS

SEQ ID NO: 42469 - protein, 10 aa, Artificial Sequence
  Description of Artificial Sequence: Synthetic epitope
RRNSYGIQNH

SEQ ID NO: 42470 - protein, 10 aa, Artificial Sequence
  Description of Artificial Sequence: Synthetic epitope
RRNTIDSTSS

SEQ ID NO: 42471 - protein, 10 aa, Artificial Sequence
  Description of Artificial Sequence: Synthetic epitope
RRNVELINEE

SEQ ID NO: 42472 - protein, 10 aa, Artificial Sequence
  Description of Artificial Sequence: Synthetic epitope
RRNVFSYGRV

SEQ ID NO: 42473 - protein, 10 aa, Artificial Sequence
  Description of Artificial Sequence: Synthetic epitope
RRNVISERER

SEQ ID NO: 42474 - protein, 10 aa, Artificial Sequence
  Description of Artificial Sequence: Synthetic epitope
RRPGDMKTKM

SEQ ID NO: 42475 - protein, 10 aa, Artificial Sequence
  Description of Artificial Sequence: Synthetic epitope
RRPKKGLIKK

SEQ ID NO: 42476 - protein, 10 aa, Artificial Sequence
  Description of Artificial Sequence: Synthetic epitope
RRPNEKKSKA

SEQ ID NO: 42477 - protein, 10 aa, Artificial Sequence
  Description of Artificial Sequence: Synthetic epitope
RRPSRARAVS

SEQ ID NO: 42478 - protein, 10 aa, Artificial Sequence
  Description of Artificial Sequence: Synthetic epitope
RRPTMSTVVE

SEQ ID NO: 42479 - protein, 10 aa, Artificial Sequence
  Description of Artificial Sequence: Synthetic epitope
RRPTRSSTLE

SEQ ID NO: 42480 - protein, 10 aa, Artificial Sequence
  Description of Artificial Sequence: Synthetic epitope
RRQANQANKL

SEQ ID NO: 42481 - protein, 10 aa, Artificial Sequence
  Description of Artificial Sequence: Synthetic epitope
RRQARIDSGS

SEQ ID NO: 42482 - protein, 10 aa, Artificial Sequence
  Description of Artificial Sequence: Synthetic epitope
RRQASLSQSI

SEQ ID NO: 42483 - protein, 10 aa, Artificial Sequence
  Description of Artificial Sequence: Synthetic epitope
RRQASSMPTG

SEQ ID NO: 42484 - protein, 10 aa, Artificial Sequence
  Description of Artificial Sequence: Synthetic epitope
RRQDRTKERP

SEQ ID NO: 42485 - protein, 10 aa, Artificial Sequence
  Description of Artificial Sequence: Synthetic epitope
RRQELMEKET

SEQ ID NO: 42486 - protein, 10 aa, Artificial Sequence
  Description of Artificial Sequence: Synthetic epitope
RRQFTVRLNG

SEQ ID NO: 42487 - protein, 10 aa, Artificial Sequence
  Description of Artificial Sequence: Synthetic epitope
RRQHQLAPLP

SEQ ID NO: 42488 - protein, 10 aa, Artificial Sequence
  Description of Artificial Sequence: Synthetic epitope
RRQIRSSTTS

SEQ ID NO: 42489 - protein, 10 aa, Artificial Sequence
  Description of Artificial Sequence: Synthetic epitope
RRQKEAASRG

SEQ ID NO: 42490 - protein, 10 aa, Artificial Sequence
  Description of Artificial Sequence: Synthetic epitope
RRQKLSSRHS

SEQ ID NO: 42491 - protein, 10 aa, Artificial Sequence
  Description of Artificial Sequence: Synthetic epitope
RRQLENEVKS

SEQ ID NO: 42492 - protein, 10 aa, Artificial Sequence
  Description of Artificial Sequence: Synthetic epitope
RRQLKQMESQ

SEQ ID NO: 42493 - protein, 10 aa, Artificial Sequence
  Description of Artificial Sequence: Synthetic epitope
RRQLLSKKLS

SEQ ID NO: 42494 - protein, 10 aa, Artificial Sequence
  Description of Artificial Sequence: Synthetic epitope
RRQLSLARPQ

SEQ ID NO: 42495 - protein, 10 aa, Artificial Sequence
  Description of Artificial Sequence: Synthetic epitope
RRQQRGAAST

SEQ ID NO: 42496 - protein, 10 aa, Artificial Sequence
  Description of Artificial Sequence: Synthetic epitope
RRQRELSILP

SEQ ID NO: 42497 - protein, 10 aa, Artificial Sequence
  Description of Artificial Sequence: Synthetic epitope
RRQRWQRDLN

SEQ ID NO: 42498 - protein, 10 aa, Artificial Sequence
  Description of Artificial Sequence: Synthetic epitope
RRQTILELEE

SEQ ID NO: 42499 - protein, 10 aa, Artificial Sequence
  Description of Artificial Sequence: Synthetic epitope
RRQTSLDQQH

SEQ ID NO: 42500 - protein, 10 aa, Artificial Sequence
  Description of Artificial Sequence: Synthetic epitope
RRQVMEQHQQ

SEQ ID NO: 42501 - protein, 10 aa, Artificial Sequence
  Description of Artificial Sequence: Synthetic epitope
RRSAEEYEYP

SEQ ID NO: 42502 - protein, 10 aa, Artificial Sequence
  Description of Artificial Sequence: Synthetic epitope
RRSAGHLKSR

SEQ ID NO: 42503 - protein, 10 aa, Artificial Sequence
  Description of Artificial Sequence: Synthetic epitope
RRSALSREIL

SEQ ID NO: 42504 - protein, 10 aa, Artificial Sequence
  Description of Artificial Sequence: Synthetic epitope
RRSAQKSRDR

SEQ ID NO: 42505 - protein, 10 aa, Artificial Sequence
  Description of Artificial Sequence: Synthetic epitope
RRSASLATKV

SEQ ID NO: 42506 - protein, 10 aa, Artificial Sequence
  Description of Artificial Sequence: Synthetic epitope
RRSATLSGSA

SEQ ID NO: 42507 - protein, 10 aa, Artificial Sequence
  Description of Artificial Sequence: Synthetic epitope
RRSAVALSSR

SEQ ID NO: 42508 - protein, 10 aa, Artificial Sequence
  Description of Artificial Sequence: Synthetic epitope
RRSDNVVTSE

SEQ ID NO: 42509 - protein, 10 aa, Artificial Sequence
  Description of Artificial Sequence: Synthetic epitope
RRSHSKSRSR

SEQ ID NO: 42510 - protein, 10 aa, Artificial Sequence
  Description of Artificial Sequence: Synthetic epitope
RRSISRARQV

SEQ ID NO: 42511 - protein, 10 aa, Artificial Sequence
  Description of Artificial Sequence: Synthetic epitope
RRSKKAESEG

SEQ ID NO: 42512 - protein, 10 aa, Artificial Sequence
  Description of Artificial Sequence: Synthetic epitope
RRSKKRRKSK

SEQ ID NO: 42513 - protein, 10 aa, Artificial Sequence
  Description of Artificial Sequence: Synthetic epitope
RRSLEQSEAA

SEQ ID NO: 42514 - protein, 10 aa, Artificial Sequence
  Description of Artificial Sequence: Synthetic epitope
RRSLRVALDV

SEQ ID NO: 42515 - protein, 10 aa, Artificial Sequence
  Description of Artificial Sequence: Synthetic epitope
RRSLSRASAR

SEQ ID NO: 42516 - protein, 10 aa, Artificial Sequence
  Description of Artificial Sequence: Synthetic epitope
RRSLVLANKR

SEQ ID NO: 42517 - protein, 10 aa, Artificial Sequence
  Description of Artificial Sequence: Synthetic epitope
RRSNEELRSA

SEQ ID NO: 42518 - protein, 10 aa, Artificial Sequence
  Description of Artificial Sequence: Synthetic epitope
RRSPRQKFEI

SEQ ID NO: 42519 - protein, 10 aa, Artificial Sequence
  Description of Artificial Sequence: Synthetic epitope
RRSPSQKKAD

SEQ ID NO: 42520 - protein, 10 aa, Artificial Sequence
  Description of Artificial Sequence: Synthetic epitope
RRSQAELETL

SEQ ID NO: 42521 - protein, 10 aa, Artificial Sequence
  Description of Artificial Sequence: Synthetic epitope
RRSQASQTDW

SEQ ID NO: 42522 - protein, 10 aa, Artificial Sequence
  Description of Artificial Sequence: Synthetic epitope
RRSQATKGEH

SEQ ID NO: 42523 - protein, 10 aa, Artificial Sequence
  Description of Artificial Sequence: Synthetic epitope
RRSQDAELRS

SEQ ID NO: 42524 - protein, 10 aa, Artificial Sequence
  Description of Artificial Sequence: Synthetic epitope
RRSQIKTDVK

SEQ ID NO: 42525 - protein, 10 aa, Artificial Sequence
  Description of Artificial Sequence: Synthetic epitope
RRSQTTSLEN

SEQ ID NO: 42526 - protein, 10 aa, Artificial Sequence
  Description of Artificial Sequence: Synthetic epitope
RRSRRLETES

SEQ ID NO: 42527 - protein, 10 aa, Artificial Sequence
  Description of Artificial Sequence: Synthetic epitope
RRSRSRTSVT

SEQ ID NO: 42528 - protein, 10 aa, Artificial Sequence
  Description of Artificial Sequence: Synthetic epitope
RRSSFSDRKF

SEQ ID NO: 42529 - protein, 10 aa, Artificial Sequence
  Description of Artificial Sequence: Synthetic epitope
RRSSKPIKRP

SEQ ID NO: 42530 - protein, 10 aa, Artificial Sequence
  Description of Artificial Sequence: Synthetic epitope
RRSSRKSKAE

SEQ ID NO: 42531 - protein, 10 aa, Artificial Sequence
  Description of Artificial Sequence: Synthetic epitope
RRSTAGDGSS

SEQ ID NO: 42532 - protein, 10 aa, Artificial Sequence
  Description of Artificial Sequence: Synthetic epitope
RRSVAIRSRE

SEQ ID NO: 42533 - protein, 10 aa, Artificial Sequence
  Description of Artificial Sequence: Synthetic epitope
RRSVSEKTAQ

SEQ ID NO: 42534 - protein, 10 aa, Artificial Sequence
  Description of Artificial Sequence: Synthetic epitope
RRSYTYWWTP

SEQ ID NO: 42535 - protein, 10 aa, Artificial Sequence
  Description of Artificial Sequence: Synthetic epitope
RRTAKSSAND

SEQ ID NO: 42536 - protein, 10 aa, Artificial Sequence
  Description of Artificial Sequence: Synthetic epitope
RRTDSRRGMQ

SEQ ID NO: 42537 - protein, 10 aa, Artificial Sequence
  Description of Artificial Sequence: Synthetic epitope
RRTGKKRASS

SEQ ID NO: 42538 - protein, 10 aa, Artificial Sequence
  Description of Artificial Sequence: Synthetic epitope
RRTKKSVDTS

SEQ ID NO: 42539 - protein, 10 aa, Artificial Sequence
  Description of Artificial Sequence: Synthetic epitope
RRTKLQMQTT

SEQ ID NO: 42540 - protein, 10 aa, Artificial Sequence
  Description of Artificial Sequence: Synthetic epitope
RRTKPSKRQY

SEQ ID NO: 42541 - protein, 10 aa, Artificial Sequence
  Description of Artificial Sequence: Synthetic epitope
RRTKSSRRGV

SEQ ID NO: 42542 - protein, 10 aa, Artificial Sequence
  Description of Artificial Sequence: Synthetic epitope
RRTLEVLEAL

SEQ ID NO: 42543 - protein, 10 aa, Artificial Sequence
  Description of Artificial Sequence: Synthetic epitope
RRTQAMSRSA

SEQ ID NO: 42544 - protein, 10 aa, Artificial Sequence
  Description of Artificial Sequence: Synthetic epitope
RRTSSTNSAK

SEQ ID NO: 42545 - protein, 10 aa, Artificial Sequence
  Description of Artificial Sequence: Synthetic epitope
RRTSVPSRSS

SEQ ID NO: 42546 - protein, 10 aa, Artificial Sequence
  Description of Artificial Sequence: Synthetic epitope
RRTTQIINIT

SEQ ID NO: 42547 - protein, 10 aa, Artificial Sequence
  Description of Artificial Sequence: Synthetic epitope
RRTVASKAHS

SEQ ID NO: 42548 - protein, 10 aa, Artificial Sequence
  Description of Artificial Sequence: Synthetic epitope
RRTVNTFSQS

SEQ ID NO: 42549 - protein, 10 aa, Artificial Sequence
  Description of Artificial Sequence: Synthetic epitope
RRVAADTVKE

SEQ ID NO: 42550 - protein, 10 aa, Artificial Sequence
  Description of Artificial Sequence: Synthetic epitope
RRVARQAQLE

SEQ ID NO: 42551 - protein, 10 aa, Artificial Sequence
  Description of Artificial Sequence: Synthetic epitope
RRVAVESAEA

SEQ ID NO: 42552 - protein, 10 aa, Artificial Sequence
  Description of Artificial Sequence: Synthetic epitope
RRVIPQQSGA

SEQ ID NO: 42553 - protein, 10 aa, Artificial Sequence
  Description of Artificial Sequence: Synthetic epitope
RRVKEMDAYG

SEQ ID NO: 42554 - protein, 10 aa, Artificial Sequence
  Description of Artificial Sequence: Synthetic epitope
RRVKSTRSRQ

SEQ ID NO: 42555 - protein, 10 aa, Artificial Sequence
  Description of Artificial Sequence: Synthetic epitope
RRVKVSSLPF

SEQ ID NO: 42556 - protein, 10 aa, Artificial Sequence
  Description of Artificial Sequence: Synthetic epitope
RRVLATEDRS

SEQ ID NO: 42557 - protein, 10 aa, Artificial Sequence
  Description of Artificial Sequence: Synthetic epitope
RRVLRAAGAA

SEQ ID NO: 42558 - protein, 10 aa, Artificial Sequence
  Description of Artificial Sequence: Synthetic epitope
RRVQKAARRQ

SEQ ID NO: 42559 - protein, 10 aa, Artificial Sequence
  Description of Artificial Sequence: Synthetic epitope
RRVRSKSDTP

SEQ ID NO: 42560 - protein, 10 aa, Artificial Sequence
  Description of Artificial Sequence: Synthetic epitope
RRVRVSVKRV

SEQ ID NO: 42561 - protein, 10 aa, Artificial Sequence
  Description of Artificial Sequence: Synthetic epitope
RRVSAALAQQ

SEQ ID NO: 42562 - protein, 10 aa, Artificial Sequence
  Description of Artificial Sequence: Synthetic epitope
RRVSKLASGP

SEQ ID NO: 42563 - protein, 10 aa, Artificial Sequence
  Description of Artificial Sequence: Synthetic epitope
RRVTQSFEAF

SEQ ID NO: 42564 - protein, 10 aa, Artificial Sequence
  Description of Artificial Sequence: Synthetic epitope
RRWASFMDAG

SEQ ID NO: 42565 - protein, 10 aa, Artificial Sequence
  Description of Artificial Sequence: Synthetic epitope
RRWIEKQNRA

SEQ ID NO: 42566 - protein, 10 aa, Artificial Sequence
  Description of Artificial Sequence: Synthetic epitope
RRWSSAQARE

SEQ ID NO: 42567 - protein, 10 aa, Artificial Sequence
  Description of Artificial Sequence: Synthetic epitope
RRWVALTESD

SEQ ID NO: 42568 - protein, 10 aa, Artificial Sequence
  Description of Artificial Sequence: Synthetic epitope
RRYAALAAED

SEQ ID NO: 42569 - protein, 10 aa, Artificial Sequence
  Description of Artificial Sequence: Synthetic epitope
RRYAEVADAG

SEQ ID NO: 42570 - protein, 10 aa, Artificial Sequence
  Description of Artificial Sequence: Synthetic epitope
RRYETQVQTR

SEQ ID NO: 42571 - protein, 10 aa, Artificial Sequence
  Description of Artificial Sequence: Synthetic epitope
RRYSASTVDV

SEQ ID NO: 42572 - protein, 10 aa, Artificial Sequence
  Description of Artificial Sequence: Synthetic epitope
RSAAGASSLK

SEQ ID NO: 42573 - protein, 10 aa, Artificial Sequence
  Description of Artificial Sequence: Synthetic epitope
RSAALVLASN

SEQ ID NO: 42574 - protein, 10 aa, Artificial Sequence
  Description of Artificial Sequence: Synthetic epitope
RSAARRHNKA

SEQ ID NO: 42575 - protein, 10 aa, Artificial Sequence
  Description of Artificial Sequence: Synthetic epitope
RSADKEKSKG

SEQ ID NO: 42576 - protein, 10 aa, Artificial Sequence
  Description of Artificial Sequence: Synthetic epitope
RSAEEGELAE

SEQ ID NO: 42577 - protein, 10 aa, Artificial Sequence
  Description of Artificial Sequence: Synthetic epitope
RSAESEEVSV

SEQ ID NO: 42578 - protein, 10 aa, Artificial Sequence
  Description of Artificial Sequence: Synthetic epitope
RSAFLASANA

SEQ ID NO: 42579 - protein, 10 aa, Artificial Sequence
  Description of Artificial Sequence: Synthetic epitope
RSAFSAKRSE

SEQ ID NO: 42580 - protein, 10 aa, Artificial Sequence
  Description of Artificial Sequence: Synthetic epitope
RSAHIQASGH

SEQ ID NO: 42581 - protein, 10 aa, Artificial Sequence
  Description of Artificial Sequence: Synthetic epitope
RSAISLLAAE

SEQ ID NO: 42582 - protein, 10 aa, Artificial Sequence
  Description of Artificial Sequence: Synthetic epitope
RSAKSSFSLL

SEQ ID NO: 42583 - protein, 10 aa, Artificial Sequence
  Description of Artificial Sequence: Synthetic epitope
RSALFVAMNS

SEQ ID NO: 42584 - protein, 10 aa, Artificial Sequence
  Description of Artificial Sequence: Synthetic epitope
RSALRDSALN

SEQ ID NO: 42585 - protein, 10 aa, Artificial Sequence
  Description of Artificial Sequence: Synthetic epitope
RSAMVGQSQQ

SEQ ID NO: 42586 - protein, 10 aa, Artificial Sequence
  Description of Artificial Sequence: Synthetic epitope
RSANSTLAQA

SEQ ID NO: 42587 - protein, 10 aa, Artificial Sequence
  Description of Artificial Sequence: Synthetic epitope
RSANTVVQSK

SEQ ID NO: 42588 - protein, 10 aa, Artificial Sequence
  Description of Artificial Sequence: Synthetic epitope
RSAPIFSKSE

SEQ ID NO: 42589 - protein, 10 aa, Artificial Sequence
  Description of Artificial Sequence: Synthetic epitope
RSAQDVSDLQ

SEQ ID NO: 42590 - protein, 10 aa, Artificial Sequence
  Description of Artificial Sequence: Synthetic epitope
RSARAKASIQ

SEQ ID NO: 42591 - protein, 10 aa, Artificial Sequence
  Description of Artificial Sequence: Synthetic epitope
RSARLHEKKE

SEQ ID NO: 42592 - protein, 10 aa, Artificial Sequence
  Description of Artificial Sequence: Synthetic epitope
RSARMLYVLQ

SEQ ID NO: 42593 - protein, 10 aa, Artificial Sequence
  Description of Artificial Sequence: Synthetic epitope
RSASDDPSRA

SEQ ID NO: 42594 - protein, 10 aa, Artificial Sequence
  Description of Artificial Sequence: Synthetic epitope
RSASKKTEIK

SEQ ID NO: 42595 - protein, 10 aa, Artificial Sequence
  Description of Artificial Sequence: Synthetic epitope
RSASNTAAEF

SEQ ID NO: 42596 - protein, 10 aa, Artificial Sequence
  Description of Artificial Sequence: Synthetic epitope
RSASVTTSPT

SEQ ID NO: 42597 - protein, 10 aa, Artificial Sequence
  Description of Artificial Sequence: Synthetic epitope
RSATSSASRP

SEQ ID NO: 42598 - protein, 10 aa, Artificial Sequence
  Description of Artificial Sequence: Synthetic epitope
RSAVKKAESE

SEQ ID NO: 42599 - protein, 10 aa, Artificial Sequence
  Description of Artificial Sequence: Synthetic epitope
RSAVTVMLSN

SEQ ID NO: 42600 - protein, 10 aa, Artificial Sequence
  Description of Artificial Sequence: Synthetic epitope
RSDAEAVSTR

SEQ ID NO: 42601 - protein, 10 aa, Artificial Sequence
  Description of Artificial Sequence: Synthetic epitope
RSDAVESAAQ

SEQ ID NO: 42602 - protein, 10 aa, Artificial Sequence
  Description of Artificial Sequence: Synthetic epitope
RSDDKSSLDS

SEQ ID NO: 42603 - protein, 10 aa, Artificial Sequence
  Description of Artificial Sequence: Synthetic epitope
RSDQQAQVHQ

SEQ ID NO: 42604 - protein, 10 aa, Artificial Sequence
  Description of Artificial Sequence: Synthetic epitope
RSDSAEQPHA

SEQ ID NO: 42605 - protein, 10 aa, Artificial Sequence
  Description of Artificial Sequence: Synthetic epitope
RSDSAHQIDE

SEQ ID NO: 42606 - protein, 10 aa, Artificial Sequence
  Description of Artificial Sequence: Synthetic epitope
RSDSAQIVAD

SEQ ID NO: 42607 - protein, 10 aa, Artificial Sequence
  Description of Artificial Sequence: Synthetic epitope
RSDSVSASER

SEQ ID NO: 42608 - protein, 10 aa, Artificial Sequence
  Description of Artificial Sequence: Synthetic epitope
RSDTQRDTTP

SEQ ID NO: 42609 - protein, 10 aa, Artificial Sequence
  Description of Artificial Sequence: Synthetic epitope
RSDVEAKSLE

SEQ ID NO: 42610 - protein, 10 aa, Artificial Sequence
  Description of Artificial Sequence: Synthetic epitope
RSDVRTEEQK

SEQ ID NO: 42611 - protein, 10 aa, Artificial Sequence
  Description of Artificial Sequence: Synthetic epitope
RSEAEASVKS

SEQ ID NO: 42612 - protein, 10 aa, Artificial Sequence
  Description of Artificial Sequence: Synthetic epitope
RSEAQRSKTQ

SEQ ID NO: 42613 - protein, 10 aa, Artificial Sequence
  Description of Artificial Sequence: Synthetic epitope
RSEARESKEV

SEQ ID NO: 42614 - protein, 10 aa, Artificial Sequence
  Description of Artificial Sequence: Synthetic epitope
RSEAYLQQVQ

SEQ ID NO: 42615 - protein, 10 aa, Artificial Sequence
  Description of Artificial Sequence: Synthetic epitope
RSEERSREAK

SEQ ID NO: 42616 - protein, 10 aa, Artificial Sequence
  Description of Artificial Sequence: Synthetic epitope
RSEETVSGLK

SEQ ID NO: 42617 - protein, 10 aa, Artificial Sequence
  Description of Artificial Sequence: Synthetic epitope
RSEFTLMAKR

SEQ ID NO: 42618 - protein, 10 aa, Artificial Sequence
  Description of Artificial Sequence: Synthetic epitope
RSEIANLILA

SEQ ID NO: 42619 - protein, 10 aa, Artificial Sequence
  Description of Artificial Sequence: Synthetic epitope
RSEKGIEHQD

SEQ ID NO: 42620 - protein, 10 aa, Artificial Sequence
  Description of Artificial Sequence: Synthetic epitope
RSEKTAKVKA

SEQ ID NO: 42621 - protein, 10 aa, Artificial Sequence
  Description of Artificial Sequence: Synthetic epitope
RSELAATLVK

SEQ ID NO: 42622 - protein, 10 aa, Artificial Sequence
  Description of Artificial Sequence: Synthetic epitope
RSELSSAESA

SEQ ID NO: 42623 - protein, 10 aa, Artificial Sequence
  Description of Artificial Sequence: Synthetic epitope
RSENKEKSAV

SEQ ID NO: 42624 - protein, 10 aa, Artificial Sequence
  Description of Artificial Sequence: Synthetic epitope
RSENRGELGI

SEQ ID NO: 42625 - protein, 10 aa, Artificial Sequence
  Description of Artificial Sequence: Synthetic epitope
RSEQDAENSM

SEQ ID NO: 42626 - protein, 10 aa, Artificial Sequence
  Description of Artificial Sequence: Synthetic epitope
RSEQQKKQQE

SEQ ID NO: 42627 - protein, 10 aa, Artificial Sequence
  Description of Artificial Sequence: Synthetic epitope
RSESEKSTEV

SEQ ID NO: 42628 - protein, 10 aa, Artificial Sequence
  Description of Artificial Sequence: Synthetic epitope
RSESETLERS

SEQ ID NO: 42629 - protein, 10 aa, Artificial Sequence
  Description of Artificial Sequence: Synthetic epitope
RSESLIDASE

SEQ ID NO: 42630 - protein, 10 aa, Artificial Sequence
  Description of Artificial Sequence: Synthetic epitope
RSESQRQRRE

SEQ ID NO: 42631 - protein, 10 aa, Artificial Sequence
  Description of Artificial Sequence: Synthetic epitope
RSESRSASEH

SEQ ID NO: 42632 - protein, 10 aa, Artificial Sequence
  Description of Artificial Sequence: Synthetic epitope
RSFFSESQGK

SEQ ID NO: 42633 - protein, 10 aa, Artificial Sequence
  Description of Artificial Sequence: Synthetic epitope
RSFSMAKLAS

SEQ ID NO: 42634 - protein, 10 aa, Artificial Sequence
  Description of Artificial Sequence: Synthetic epitope
RSFSNVTKQD

SEQ ID NO: 42635 - protein, 10 aa, Artificial Sequence
  Description of Artificial Sequence: Synthetic epitope
RSGAQEFGEP

SEQ ID NO: 42636 - protein, 10 aa, Artificial Sequence
  Description of Artificial Sequence: Synthetic epitope
RSGEITKIRR

SEQ ID NO: 42637 - protein, 10 aa, Artificial Sequence
  Description of Artificial Sequence: Synthetic epitope
RSGELHTSAQ

SEQ ID NO: 42638 - protein, 10 aa, Artificial Sequence
  Description of Artificial Sequence: Synthetic epitope
RSGGSKTGGK

SEQ ID NO: 42639 - protein, 10 aa, Artificial Sequence
  Description of Artificial Sequence: Synthetic epitope
RSGKTELAEP

SEQ ID NO: 42640 - protein, 10 aa, Artificial Sequence
  Description of Artificial Sequence: Synthetic epitope
RSGMAPVKYH

SEQ ID NO: 42641 - protein, 10 aa, Artificial Sequence
  Description of Artificial Sequence: Synthetic epitope
RSGNIALSLS

SEQ ID NO: 42642 - protein, 10 aa, Artificial Sequence
  Description of Artificial Sequence: Synthetic epitope
RSGQLGIQEE

SEQ ID NO: 42643 - protein, 10 aa, Artificial Sequence
  Description of Artificial Sequence: Synthetic epitope
RSGQRNVMEV

SEQ ID NO: 42644 - protein, 10 aa, Artificial Sequence
  Description of Artificial Sequence: Synthetic epitope
RSGSAADQAK

SEQ ID NO: 42645 - protein, 10 aa, Artificial Sequence
  Description of Artificial Sequence: Synthetic epitope
RSGTISTSAA

SEQ ID NO: 42646 - protein, 10 aa, Artificial Sequence
  Description of Artificial Sequence: Synthetic epitope
RSGTKQLKHI

SEQ ID NO: 42647 - protein, 10 aa, Artificial Sequence
  Description of Artificial Sequence: Synthetic epitope
RSGTRTSESK

SEQ ID NO: 42648 - protein, 10 aa, Artificial Sequence
  Description of Artificial Sequence: Synthetic epitope
RSHFKVAFTQ

SEQ ID NO: 42649 - protein, 10 aa, Artificial Sequence
  Description of Artificial Sequence: Synthetic epitope
RSHLTAAKPK

SEQ ID NO: 42650 - protein, 10 aa, Artificial Sequence
  Description of Artificial Sequence: Synthetic epitope
RSHQIERMMS

SEQ ID NO: 42651 - protein, 10 aa, Artificial Sequence
  Description of Artificial Sequence: Synthetic epitope
RSHSLAKKAQ

SEQ ID NO: 42652 - protein, 10 aa, Artificial Sequence
  Description of Artificial Sequence: Synthetic epitope
RSHSTQSEAG

SEQ ID NO: 42653 - protein, 10 aa, Artificial Sequence
  Description of Artificial Sequence: Synthetic epitope
RSIAEQAHEL

SEQ ID NO: 42654 - protein, 10 aa, Artificial Sequence
  Description of Artificial Sequence: Synthetic epitope
RSIEIQELQV

SEQ ID NO: 42655 - protein, 10 aa, Artificial Sequence
  Description of Artificial Sequence: Synthetic epitope
RSIEKSNSVK

SEQ ID NO: 42656 - protein, 10 aa, Artificial Sequence
  Description of Artificial Sequence: Synthetic epitope
RSIELALTSQ

SEQ ID NO: 42657 - protein, 10 aa, Artificial Sequence
  Description of Artificial Sequence: Synthetic epitope
RSIHTSSKTA

SEQ ID NO: 42658 - protein, 10 aa, Artificial Sequence
  Description of Artificial Sequence: Synthetic epitope
RSINDMMSSM

SEQ ID NO: 42659 - protein, 10 aa, Artificial Sequence
  Description of Artificial Sequence: Synthetic epitope
RSIQNSISFS

SEQ ID NO: 42660 - protein, 10 aa, Artificial Sequence
  Description of Artificial Sequence: Synthetic epitope
RSIQTLVQNE

SEQ ID NO: 42661 - protein, 10 aa, Artificial Sequence
  Description of Artificial Sequence: Synthetic epitope
RSIRADRAKK

SEQ ID NO: 42662 - protein, 10 aa, Artificial Sequence
  Description of Artificial Sequence: Synthetic epitope
RSISESAFSA

SEQ ID NO: 42663 - protein, 10 aa, Artificial Sequence
  Description of Artificial Sequence: Synthetic epitope
RSISMKQNVE

SEQ ID NO: 42664 - protein, 10 aa, Artificial Sequence
  Description of Artificial Sequence: Synthetic epitope
RSISRHIENI

SEQ ID NO: 42665 - protein, 10 aa, Artificial Sequence
  Description of Artificial Sequence: Synthetic epitope
RSISVDLAES

SEQ ID NO: 42666 - protein, 10 aa, Artificial Sequence
  Description of Artificial Sequence: Synthetic epitope
RSITGRSVSE

SEQ ID NO: 42667 - protein, 10 aa, Artificial Sequence
  Description of Artificial Sequence: Synthetic epitope
RSKALSDSYE

SEQ ID NO: 42668 - protein, 10 aa, Artificial Sequence
  Description of Artificial Sequence: Synthetic epitope
RSKHTKSSKH

SEQ ID NO: 42669 - protein, 10 aa, Artificial Sequence
  Description of Artificial Sequence: Synthetic epitope
RSKKAKKMIG

SEQ ID NO: 42670 - protein, 10 aa, Artificial Sequence
  Description of Artificial Sequence: Synthetic epitope
RSKKATNAVD

SEQ ID NO: 42671 - protein, 10 aa, Artificial Sequence
  Description of Artificial Sequence: Synthetic epitope
RSKKDDINLL

SEQ ID NO: 42672 - protein, 10 aa, Artificial Sequence
  Description of Artificial Sequence: Synthetic epitope
RSKKSSVSDA

SEQ ID NO: 42673 - protein, 10 aa, Artificial Sequence
  Description of Artificial Sequence: Synthetic epitope
RSKKTNTVRN

SEQ ID NO: 42674 - protein, 10 aa, Artificial Sequence
  Description of Artificial Sequence: Synthetic epitope
RSKKVSVPST

SEQ ID NO: 42675 - protein, 10 aa, Artificial Sequence
  Description of Artificial Sequence: Synthetic epitope
RSKLNLTQPS

SEQ ID NO: 42676 - protein, 10 aa, Artificial Sequence
  Description of Artificial Sequence: Synthetic epitope
RSKLSNVATS

SEQ ID NO: 42677 - protein, 10 aa, Artificial Sequence
  Description of Artificial Sequence: Synthetic epitope
RSKNKNSLSG

SEQ ID NO: 42678 - protein, 10 aa, Artificial Sequence
  Description of Artificial Sequence: Synthetic epitope
RSKPYTRRPK

SEQ ID NO: 42679 - protein, 10 aa, Artificial Sequence
  Description of Artificial Sequence: Synthetic epitope
RSKQIRKEYF

SEQ ID NO: 42680 - protein, 10 aa, Artificial Sequence
  Description of Artificial Sequence: Synthetic epitope
RSKQKITAEI

SEQ ID NO: 42681 - protein, 10 aa, Artificial Sequence
  Description of Artificial Sequence: Synthetic epitope
RSKQKVSKET

SEQ ID NO: 42682 - protein, 10 aa, Artificial Sequence
  Description of Artificial Sequence: Synthetic epitope
RSKQSKTERE

SEQ ID NO: 42683 - protein, 10 aa, Artificial Sequence
  Description of Artificial Sequence: Synthetic epitope
RSKQSLVLER

SEQ ID NO: 42684 - protein, 10 aa, Artificial Sequence
  Description of Artificial Sequence: Synthetic epitope
RSKREVKRQK

SEQ ID NO: 42685 - protein, 10 aa, Artificial Sequence
  Description of Artificial Sequence: Synthetic epitope
RSKSKSKGEL

SEQ ID NO: 42686 - protein, 10 aa, Artificial Sequence
  Description of Artificial Sequence: Synthetic epitope
RSKSSEKRQA

SEQ ID NO: 42687 - protein, 10 aa, Artificial Sequence
  Description of Artificial Sequence: Synthetic epitope
RSKTAIGLSH

SEQ ID NO: 42688 - protein, 10 aa, Artificial Sequence
  Description of Artificial Sequence: Synthetic epitope
RSKVAFQFIE

SEQ ID NO: 42689 - protein, 10 aa, Artificial Sequence
  Description of Artificial Sequence: Synthetic epitope
RSKVTAIKSL

SEQ ID NO: 42690 - protein, 10 aa, Artificial Sequence
  Description of Artificial Sequence: Synthetic epitope
RSKWRSHDFY

SEQ ID NO: 42691 - protein, 10 aa, Artificial Sequence
  Description of Artificial Sequence: Synthetic epitope
RSLAMLEKTV

SEQ ID NO: 42692 - protein, 10 aa, Artificial Sequence
  Description of Artificial Sequence: Synthetic epitope
RSLASSAQPG

SEQ ID NO: 42693 - protein, 10 aa, Artificial Sequence
  Description of Artificial Sequence: Synthetic epitope
RSLASSKTRF

SEQ ID NO: 42694 - protein, 10 aa, Artificial Sequence
  Description of Artificial Sequence: Synthetic epitope
RSLDSPTSSP

SEQ ID NO: 42695 - protein, 10 aa, Artificial Sequence
  Description of Artificial Sequence: Synthetic epitope
RSLEAAQDAR

SEQ ID NO: 42696 - protein, 10 aa, Artificial Sequence
  Description of Artificial Sequence: Synthetic epitope
RSLELSVVEP

SEQ ID NO: 42697 - protein, 10 aa, Artificial Sequence
  Description of Artificial Sequence: Synthetic epitope
RSLETVSNTE

SEQ ID NO: 42698 - protein, 10 aa, Artificial Sequence
  Description of Artificial Sequence: Synthetic epitope
RSLGKLTKLT

SEQ ID NO: 42699 - protein, 10 aa, Artificial Sequence
  Description of Artificial Sequence: Synthetic epitope
RSLGVKIDSP

SEQ ID NO: 42700 - protein, 10 aa, Artificial Sequence
  Description of Artificial Sequence: Synthetic epitope
RSLISRESLA

SEQ ID NO: 42701 - protein, 10 aa, Artificial Sequence
  Description of Artificial Sequence: Synthetic epitope
RSLKALKYKS

SEQ ID NO: 42702 - protein, 10 aa, Artificial Sequence
  Description of Artificial Sequence: Synthetic epitope
RSLKVGEAVH

SEQ ID NO: 42703 - protein, 10 aa, Artificial Sequence
  Description of Artificial Sequence: Synthetic epitope
RSLLINAVEA

SEQ ID NO: 42704 - protein, 10 aa, Artificial Sequence
  Description of Artificial Sequence: Synthetic epitope
RSLLINAVEA

SEQ ID NO: 42705 - protein, 10 aa, Artificial Sequence
  Description of Artificial Sequence: Synthetic epitope
RSLLKDISQK

SEQ ID NO: 42706 - protein, 10 aa, Artificial Sequence
  Description of Artificial Sequence: Synthetic epitope
RSLLNLLSSQ

SEQ ID NO: 42707 - protein, 10 aa, Artificial Sequence
  Description of Artificial Sequence: Synthetic epitope
RSLLQTHILW

SEQ ID NO: 42708 - protein, 10 aa, Artificial Sequence
  Description of Artificial Sequence: Synthetic epitope
RSLMGTLSKL

SEQ ID NO: 42709 - protein, 10 aa, Artificial Sequence
  Description of Artificial Sequence: Synthetic epitope
RSLMSNRDSV

SEQ ID NO: 42710 - protein, 10 aa, Artificial Sequence
  Description of Artificial Sequence: Synthetic epitope
RSLNAKAVVA

SEQ ID NO: 42711 - protein, 10 aa, Artificial Sequence
  Description of Artificial Sequence: Synthetic epitope
RSLQGKSTTL

SEQ ID NO: 42712 - protein, 10 aa, Artificial Sequence
  Description of Artificial Sequence: Synthetic epitope
RSLQKQTSYE

SEQ ID NO: 42713 - protein, 10 aa, Artificial Sequence
  Description of Artificial Sequence: Synthetic epitope
RSLQKVRRVH

SEQ ID NO: 42714 - protein, 10 aa, Artificial Sequence
  Description of Artificial Sequence: Synthetic epitope
RSLRAVAPGL

SEQ ID NO: 42715 - protein, 10 aa, Artificial Sequence
  Description of Artificial Sequence: Synthetic epitope
RSLRNVVSAV

SEQ ID NO: 42716 - protein, 10 aa, Artificial Sequence
  Description of Artificial Sequence: Synthetic epitope
RSLRSNSSVN

SEQ ID NO: 42717 - protein, 10 aa, Artificial Sequence
  Description of Artificial Sequence: Synthetic epitope
RSLSANSIKV

SEQ ID NO: 42718 - protein, 10 aa, Artificial Sequence
  Description of Artificial Sequence: Synthetic epitope
RSLSGSADEN

SEQ ID NO: 42719 - protein, 10 aa, Artificial Sequence
  Description of Artificial Sequence: Synthetic epitope
RSLSKAAELD

SEQ ID NO: 42720 - protein, 10 aa, Artificial Sequence
  Description of Artificial Sequence: Synthetic epitope
RSLSLRRQES

SEQ ID NO: 42721 - protein, 10 aa, Artificial Sequence
  Description of Artificial Sequence: Synthetic epitope
RSLSNINSEM

SEQ ID NO: 42722 - protein, 10 aa, Artificial Sequence
  Description of Artificial Sequence: Synthetic epitope
RSLSQVAMDL

SEQ ID NO: 42723 - protein, 10 aa, Artificial Sequence
  Description of Artificial Sequence: Synthetic epitope
RSLSSAINAS

SEQ ID NO: 42724 - protein, 10 aa, Artificial Sequence
  Description of Artificial Sequence: Synthetic epitope
RSLSSLMGER

SEQ ID NO: 42725 - protein, 10 aa, Artificial Sequence
  Description of Artificial Sequence: Synthetic epitope
RSLSTEQLFR

SEQ ID NO: 42726 - protein, 10 aa, Artificial Sequence
  Description of Artificial Sequence: Synthetic epitope
RSLSVAALAA

SEQ ID NO: 42727 - protein, 10 aa, Artificial Sequence
  Description of Artificial Sequence: Synthetic epitope
RSLSVQSKSH

SEQ ID NO: 42728 - protein, 10 aa, Artificial Sequence
  Description of Artificial Sequence: Synthetic epitope
RSLTATGGNH

SEQ ID NO: 42729 - protein, 10 aa, Artificial Sequence
  Description of Artificial Sequence: Synthetic epitope
RSLVEIIEHG

SEQ ID NO: 42730 - protein, 10 aa, Artificial Sequence
  Description of Artificial Sequence: Synthetic epitope
RSLVKSASPE

SEQ ID NO: 42731 - protein, 10 aa, Artificial Sequence
  Description of Artificial Sequence: Synthetic epitope
RSMADLKHSS

SEQ ID NO: 42732 - protein, 10 aa, Artificial Sequence
  Description of Artificial Sequence: Synthetic epitope
RSMANEANSE

SEQ ID NO: 42733 - protein, 10 aa, Artificial Sequence
  Description of Artificial Sequence: Synthetic epitope
RSMESLQMPM

SEQ ID NO: 42734 - protein, 10 aa, Artificial Sequence
  Description of Artificial Sequence: Synthetic epitope
RSMILRSRTK

SEQ ID NO: 42735 - protein, 10 aa, Artificial Sequence
  Description of Artificial Sequence: Synthetic epitope
RSMKKRTSTG

SEQ ID NO: 42736 - protein, 10 aa, Artificial Sequence
  Description of Artificial Sequence: Synthetic epitope
RSMLATSSQE

SEQ ID NO: 42737 - protein, 10 aa, Artificial Sequence
  Description of Artificial Sequence: Synthetic epitope
RSMLKRIQDK

SEQ ID NO: 42738 - protein, 10 aa, Artificial Sequence
  Description of Artificial Sequence: Synthetic epitope
RSMQLDYTTW

SEQ ID NO: 42739 - protein, 10 aa, Artificial Sequence
  Description of Artificial Sequence: Synthetic epitope
RSMSETGTAA

SEQ ID NO: 42740 - protein, 10 aa, Artificial Sequence
  Description of Artificial Sequence: Synthetic epitope
RSMSRKVTTN

SEQ ID NO: 42741 - protein, 10 aa, Artificial Sequence
  Description of Artificial Sequence: Synthetic epitope
RSMVASKIPS

SEQ ID NO: 42742 - protein, 10 aa, Artificial Sequence
  Description of Artificial Sequence: Synthetic epitope
RSMVKILSSL

SEQ ID NO: 42743 - protein, 10 aa, Artificial Sequence
  Description of Artificial Sequence: Synthetic epitope
RSNAKQIVSE

SEQ ID NO: 42744 - protein, 10 aa, Artificial Sequence
  Description of Artificial Sequence: Synthetic epitope
RSNATQLDGP

SEQ ID NO: 42745 - protein, 10 aa, Artificial Sequence
  Description of Artificial Sequence: Synthetic epitope
RSNGAIQKIV

SEQ ID NO: 42746 - protein, 10 aa, Artificial Sequence
  Description of Artificial Sequence: Synthetic epitope
RSNHKKQLSH

SEQ ID NO: 42747 - protein, 10 aa, Artificial Sequence
  Description of Artificial Sequence: Synthetic epitope
RSNIRRGAQD

SEQ ID NO: 42748 - protein, 10 aa, Artificial Sequence
  Description of Artificial Sequence: Synthetic epitope
RSNLQVSNEP

SEQ ID NO: 42749 - protein, 10 aa, Artificial Sequence
  Description of Artificial Sequence: Synthetic epitope
RSNLSTRDAS

SEQ ID NO: 42750 - protein, 10 aa, Artificial Sequence
  Description of Artificial Sequence: Synthetic epitope
RSNNSLRDST

SEQ ID NO: 42751 - protein, 10 aa, Artificial Sequence
  Description of Artificial Sequence: Synthetic epitope
RSNRNSIERE

SEQ ID NO: 42752 - protein, 10 aa, Artificial Sequence
  Description of Artificial Sequence: Synthetic epitope
RSNSQTLSDA

SEQ ID NO: 42753 - protein, 10 aa, Artificial Sequence
  Description of Artificial Sequence: Synthetic epitope
RSNVSRKRSS

SEQ ID NO: 42754 - protein, 10 aa, Artificial Sequence
  Description of Artificial Sequence: Synthetic epitope
RSPASSANSG

SEQ ID NO: 42755 - protein, 10 aa, Artificial Sequence
  Description of Artificial Sequence: Synthetic epitope
RSPGASRKRT

SEQ ID NO: 42756 - protein, 10 aa, Artificial Sequence
  Description of Artificial Sequence: Synthetic epitope
RSPNISLKVD

SEQ ID NO: 42757 - protein, 10 aa, Artificial Sequence
  Description of Artificial Sequence: Synthetic epitope
RSPRISLRSS

SEQ ID NO: 42758 - protein, 10 aa, Artificial Sequence
  Description of Artificial Sequence: Synthetic epitope
RSPRRKSAGS

SEQ ID NO: 42759 - protein, 10 aa, Artificial Sequence
  Description of Artificial Sequence: Synthetic epitope
RSPSHTSLSA

SEQ ID NO: 42760 - protein, 10 aa, Artificial Sequence
  Description of Artificial Sequence: Synthetic epitope
RSPSIRNVQE

SEQ ID NO: 42761 - protein, 10 aa, Artificial Sequence
  Description of Artificial Sequence: Synthetic epitope
RSPSIVASNQ

SEQ ID NO: 42762 - protein, 10 aa, Artificial Sequence
  Description of Artificial Sequence: Synthetic epitope
RSPSVASMKA

SEQ ID NO: 42763 - protein, 10 aa, Artificial Sequence
  Description of Artificial Sequence: Synthetic epitope
RSQAALGRVR

SEQ ID NO: 42764 - protein, 10 aa, Artificial Sequence
  Description of Artificial Sequence: Synthetic epitope
RSQALGNQNS

SEQ ID NO: 42765 - protein, 10 aa, Artificial Sequence
  Description of Artificial Sequence: Synthetic epitope
RSQEFVIPQE

SEQ ID NO: 42766 - protein, 10 aa, Artificial Sequence
  Description of Artificial Sequence: Synthetic epitope
RSQEKEKQNE

SEQ ID NO: 42767 - protein, 10 aa, Artificial Sequence
  Description of Artificial Sequence: Synthetic epitope
RSQELAMEKD

SEQ ID NO: 42768 - protein, 10 aa, Artificial Sequence
  Description of Artificial Sequence: Synthetic epitope
RSQGLASGEK

SEQ ID NO: 42769 - protein, 10 aa, Artificial Sequence
  Description of Artificial Sequence: Synthetic epitope
RSQIGLNTMS

SEQ ID NO: 42770 - protein, 10 aa, Artificial Sequence
  Description of Artificial Sequence: Synthetic epitope
RSQISSVNSD

SEQ ID NO: 42771 - protein, 10 aa, Artificial Sequence
  Description of Artificial Sequence: Synthetic epitope
RSQIYSVSSE

SEQ ID NO: 42772 - protein, 10 aa, Artificial Sequence
  Description of Artificial Sequence: Synthetic epitope
RSQKSGIRLQ

SEQ ID NO: 42773 - protein, 10 aa, Artificial Sequence
  Description of Artificial Sequence: Synthetic epitope
RSQKSKAKSK

SEQ ID NO: 42774 - protein, 10 aa, Artificial Sequence
  Description of Artificial Sequence: Synthetic epitope
RSQKSRSEQD

SEQ ID NO: 42775 - protein, 10 aa, Artificial Sequence
  Description of Artificial Sequence: Synthetic epitope
RSQQAARDKQ

SEQ ID NO: 42776 - protein, 10 aa, Artificial Sequence
  Description of Artificial Sequence: Synthetic epitope
RSQRRYSTDS

SEQ ID NO: 42777 - protein, 10 aa, Artificial Sequence
  Description of Artificial Sequence: Synthetic epitope
RSQRSSKENF

SEQ ID NO: 42778 - protein, 10 aa, Artificial Sequence
  Description of Artificial Sequence: Synthetic epitope
RSQSLTMQDE

SEQ ID NO: 42779 - protein, 10 aa, Artificial Sequence
  Description of Artificial Sequence: Synthetic epitope
RSQSQMIENV

SEQ ID NO: 42780 - protein, 10 aa, Artificial Sequence
  Description of Artificial Sequence: Synthetic epitope
RSQSSRQTAK

SEQ ID NO: 42781 - protein, 10 aa, Artificial Sequence
  Description of Artificial Sequence: Synthetic epitope
RSQSTAKREK

SEQ ID NO: 42782 - protein, 10 aa, Artificial Sequence
  Description of Artificial Sequence: Synthetic epitope
RSQSTSEQEK

SEQ ID NO: 42783 - protein, 10 aa, Artificial Sequence
  Description of Artificial Sequence: Synthetic epitope
RSQSTVSAGS

SEQ ID NO: 42784 - protein, 10 aa, Artificial Sequence
  Description of Artificial Sequence: Synthetic epitope
RSQSVKMKDK

SEQ ID NO: 42785 - protein, 10 aa, Artificial Sequence
  Description of Artificial Sequence: Synthetic epitope
RSQTLLQEAQ

SEQ ID NO: 42786 - protein, 10 aa, Artificial Sequence
  Description of Artificial Sequence: Synthetic epitope
RSRAALRALR

SEQ ID NO: 42787 - protein, 10 aa, Artificial Sequence
  Description of Artificial Sequence: Synthetic epitope
RSRAAMAQWR

SEQ ID NO: 42788 - protein, 10 aa, Artificial Sequence
  Description of Artificial Sequence: Synthetic epitope
RSRAGVVEGQ

SEQ ID NO: 42789 - protein, 10 aa, Artificial Sequence
  Description of Artificial Sequence: Synthetic epitope
RSRAQKRFQQ

SEQ ID NO: 42790 - protein, 10 aa, Artificial Sequence
  Description of Artificial Sequence: Synthetic epitope
RSRARKQAYT

SEQ ID NO: 42791 - protein, 10 aa, Artificial Sequence
  Description of Artificial Sequence: Synthetic epitope
RSRDSSARAK

SEQ ID NO: 42792 - protein, 10 aa, Artificial Sequence
  Description of Artificial Sequence: Synthetic epitope
RSREKSKATE

SEQ ID NO: 42793 - protein, 10 aa, Artificial Sequence
  Description of Artificial Sequence: Synthetic epitope
RSRENLAGAH

SEQ ID NO: 42794 - protein, 10 aa, Artificial Sequence
  Description of Artificial Sequence: Synthetic epitope
RSRERRSDSE

SEQ ID NO: 42795 - protein, 10 aa, Artificial Sequence
  Description of Artificial Sequence: Synthetic epitope
RSRGKVLKTK

SEQ ID NO: 42796 - protein, 10 aa, Artificial Sequence
  Description of Artificial Sequence: Synthetic epitope
RSRGRAQVQE

SEQ ID NO: 42797 - protein, 10 aa, Artificial Sequence
  Description of Artificial Sequence: Synthetic epitope
RSRKRVLVVA

SEQ ID NO: 42798 - protein, 10 aa, Artificial Sequence
  Description of Artificial Sequence: Synthetic epitope
RSRKTAQKTA

SEQ ID NO: 42799 - protein, 10 aa, Artificial Sequence
  Description of Artificial Sequence: Synthetic epitope
RSRRSRSSVT

SEQ ID NO: 42800 - protein, 10 aa, Artificial Sequence
  Description of Artificial Sequence: Synthetic epitope
RSRRSSQRAV

SEQ ID NO: 42801 - protein, 10 aa, Artificial Sequence
  Description of Artificial Sequence: Synthetic epitope
RSRSADRKDG

SEQ ID NO: 42802 - protein, 10 aa, Artificial Sequence
  Description of Artificial Sequence: Synthetic epitope
RSRSAIVIKA

SEQ ID NO: 42803 - protein, 10 aa, Artificial Sequence
  Description of Artificial Sequence: Synthetic epitope
RSRSERLVAE

SEQ ID NO: 42804 - protein, 10 aa, Artificial Sequence
  Description of Artificial Sequence: Synthetic epitope
RSRSKLVSRP

SEQ ID NO: 42805 - protein, 10 aa, Artificial Sequence
  Description of Artificial Sequence: Synthetic epitope
RSRSKSASKT

SEQ ID NO: 42806 - protein, 10 aa, Artificial Sequence
  Description of Artificial Sequence: Synthetic epitope
RSRSKSSDPD

SEQ ID NO: 42807 - protein, 10 aa, Artificial Sequence
  Description of Artificial Sequence: Synthetic epitope
RSRSKVKEDK

SEQ ID NO: 42808 - protein, 10 aa, Artificial Sequence
  Description of Artificial Sequence: Synthetic epitope
RSRSLMKNRR

SEQ ID NO: 42809 - protein, 10 aa, Artificial Sequence
  Description of Artificial Sequence: Synthetic epitope
RSRSRRSSIG

SEQ ID NO: 42810 - protein, 10 aa, Artificial Sequence
  Description of Artificial Sequence: Synthetic epitope
RSRSRSQRSD

SEQ ID NO: 42811 - protein, 10 aa, Artificial Sequence
  Description of Artificial Sequence: Synthetic epitope
RSRSRSRKSY

SEQ ID NO: 42812 - protein, 10 aa, Artificial Sequence
  Description of Artificial Sequence: Synthetic epitope
RSRSRSRSKG

SEQ ID NO: 42813 - protein, 10 aa, Artificial Sequence
  Description of Artificial Sequence: Synthetic epitope
RSRSRTSPVS

SEQ ID NO: 42814 - protein, 10 aa, Artificial Sequence
  Description of Artificial Sequence: Synthetic epitope
RSRSRTSPVT

SEQ ID NO: 42815 - protein, 10 aa, Artificial Sequence
  Description of Artificial Sequence: Synthetic epitope
RSRSRTSPVT

SEQ ID NO: 42816 - protein, 10 aa, Artificial Sequence
  Description of Artificial Sequence: Synthetic epitope
RSRSSHARPV

SEQ ID NO: 42817 - protein, 10 aa, Artificial Sequence
  Description of Artificial Sequence: Synthetic epitope
RSRSTAVMPK

SEQ ID NO: 42818 - protein, 10 aa, Artificial Sequence
  Description of Artificial Sequence: Synthetic epitope
RSRSTSRERE

SEQ ID NO: 42819 - protein, 10 aa, Artificial Sequence
  Description of Artificial Sequence: Synthetic epitope
RSRSVLVQRS

SEQ ID NO: 42820 - protein, 10 aa, Artificial Sequence
  Description of Artificial Sequence: Synthetic epitope
RSRTASTGTD

SEQ ID NO: 42821 - protein, 10 aa, Artificial Sequence
  Description of Artificial Sequence: Synthetic epitope
RSRTFIIQSF

SEQ ID NO: 42822 - protein, 10 aa, Artificial Sequence
  Description of Artificial Sequence: Synthetic epitope
RSRTVAQQHD

SEQ ID NO: 42823 - protein, 10 aa, Artificial Sequence
  Description of Artificial Sequence: Synthetic epitope
RSRVEHVQHV

SEQ ID NO: 42824 - protein, 10 aa, Artificial Sequence
  Description of Artificial Sequence: Synthetic epitope
RSRVTTSLEA

SEQ ID NO: 42825 - protein, 10 aa, Artificial Sequence
  Description of Artificial Sequence: Synthetic epitope
RSRYSRSKSR

SEQ ID NO: 42826 - protein, 10 aa, Artificial Sequence
  Description of Artificial Sequence: Synthetic epitope
RSSAARMPET

SEQ ID NO: 42827 - protein, 10 aa, Artificial Sequence
  Description of Artificial Sequence: Synthetic epitope
RSSASFSTTA

SEQ ID NO: 42828 - protein, 10 aa, Artificial Sequence
  Description of Artificial Sequence: Synthetic epitope
RSSDAQGSGD

SEQ ID NO: 42829 - protein, 10 aa, Artificial Sequence
  Description of Artificial Sequence: Synthetic epitope
RSSDGTTGTT

SEQ ID NO: 42830 - protein, 10 aa, Artificial Sequence
  Description of Artificial Sequence: Synthetic epitope
RSSDKRKATV

SEQ ID NO: 42831 - protein, 10 aa, Artificial Sequence
  Description of Artificial Sequence: Synthetic epitope
RSSDMDQQED

SEQ ID NO: 42832 - protein, 10 aa, Artificial Sequence
  Description of Artificial Sequence: Synthetic epitope
RSSEIEELKA

SEQ ID NO: 42833 - protein, 10 aa, Artificial Sequence
  Description of Artificial Sequence: Synthetic epitope
RSSERSAKKF

SEQ ID NO: 42834 - protein, 10 aa, Artificial Sequence
  Description of Artificial Sequence: Synthetic epitope
RSSESLMSDQ

SEQ ID NO: 42835 - protein, 10 aa, Artificial Sequence
  Description of Artificial Sequence: Synthetic epitope
RSSESTLGPQ

SEQ ID NO: 42836 - protein, 10 aa, Artificial Sequence
  Description of Artificial Sequence: Synthetic epitope
RSSEVRAARL

SEQ ID NO: 42837 - protein, 10 aa, Artificial Sequence
  Description of Artificial Sequence: Synthetic epitope
RSSGARTRRV

SEQ ID NO: 42838 - protein, 10 aa, Artificial Sequence
  Description of Artificial Sequence: Synthetic epitope
RSSGSKLSTR

SEQ ID NO: 42839 - protein, 10 aa, Artificial Sequence
  Description of Artificial Sequence: Synthetic epitope
RSSGSPKFAM

SEQ ID NO: 42840 - protein, 10 aa, Artificial Sequence
  Description of Artificial Sequence: Synthetic epitope
RSSIFFRELK

SEQ ID NO: 42841 - protein, 10 aa, Artificial Sequence
  Description of Artificial Sequence: Synthetic epitope
RSSINSVDGE

SEQ ID NO: 42842 - protein, 10 aa, Artificial Sequence
  Description of Artificial Sequence: Synthetic epitope
RSSKDNKFQV

SEQ ID NO: 42843 - protein, 10 aa, Artificial Sequence
  Description of Artificial Sequence: Synthetic epitope
RSSKEVKKSV

SEQ ID NO: 42844 - protein, 10 aa, Artificial Sequence
  Description of Artificial Sequence: Synthetic epitope
RSSKFSVESA

SEQ ID NO: 42845 - protein, 10 aa, Artificial Sequence
  Description of Artificial Sequence: Synthetic epitope
RSSKKGTENG

SEQ ID NO: 42846 - protein, 10 aa, Artificial Sequence
  Description of Artificial Sequence: Synthetic epitope
RSSKPKDFKT

SEQ ID NO: 42847 - protein, 10 aa, Artificial Sequence
  Description of Artificial Sequence: Synthetic epitope
RSSKSKPLTL

SEQ ID NO: 42848 - protein, 10 aa, Artificial Sequence
  Description of Artificial Sequence: Synthetic epitope
RSSLLAVRGQ

SEQ ID NO: 42849 - protein, 10 aa, Artificial Sequence
  Description of Artificial Sequence: Synthetic epitope
RSSMKVDKSF

SEQ ID NO: 42850 - protein, 10 aa, Artificial Sequence
  Description of Artificial Sequence: Synthetic epitope
RSSMSENRMS

SEQ ID NO: 42851 - protein, 10 aa, Artificial Sequence
  Description of Artificial Sequence: Synthetic epitope
RSSNPSISDD

SEQ ID NO: 42852 - protein, 10 aa, Artificial Sequence
  Description of Artificial Sequence: Synthetic epitope
RSSNTFSIKK

SEQ ID NO: 42853 - protein, 10 aa, Artificial Sequence
  Description of Artificial Sequence: Synthetic epitope
RSSPELTRKA

SEQ ID NO: 42854 - protein, 10 aa, Artificial Sequence
  Description of Artificial Sequence: Synthetic epitope
RSSQGLSRGE

SEQ ID NO: 42855 - protein, 10 aa, Artificial Sequence
  Description of Artificial Sequence: Synthetic epitope
RSSQNIPVQQ

SEQ ID NO: 42856 - protein, 10 aa, Artificial Sequence
  Description of Artificial Sequence: Synthetic epitope
RSSRSEIKGF

SEQ ID NO: 42857 - protein, 10 aa, Artificial Sequence
  Description of Artificial Sequence: Synthetic epitope
RSSTQQDPRR

SEQ ID NO: 42858 - protein, 10 aa, Artificial Sequence
  Description of Artificial Sequence: Synthetic epitope
RSSTSSEPTP

SEQ ID NO: 42859 - protein, 10 aa, Artificial Sequence
  Description of Artificial Sequence: Synthetic epitope
RSSVEVRMEF

SEQ ID NO: 42860 - protein, 10 aa, Artificial Sequence
  Description of Artificial Sequence: Synthetic epitope
RSSVIVRSQT

SEQ ID NO: 42861 - protein, 10 aa, Artificial Sequence
  Description of Artificial Sequence: Synthetic epitope
RSSVRSDAAM

SEQ ID NO: 42862 - protein, 10 aa, Artificial Sequence
  Description of Artificial Sequence: Synthetic epitope
RSSVRVAQKG

SEQ ID NO: 42863 - protein, 10 aa, Artificial Sequence
  Description of Artificial Sequence: Synthetic epitope
RSSYTYSKSR

SEQ ID NO: 42864 - protein, 10 aa, Artificial Sequence
  Description of Artificial Sequence: Synthetic epitope
RSTAILPEQQ

SEQ ID NO: 42865 - protein, 10 aa, Artificial Sequence
  Description of Artificial Sequence: Synthetic epitope
RSTAKRFISA

SEQ ID NO: 42866 - protein, 10 aa, Artificial Sequence
  Description of Artificial Sequence: Synthetic epitope
RSTEANKKET

SEQ ID NO: 42867 - protein, 10 aa, Artificial Sequence
  Description of Artificial Sequence: Synthetic epitope
RSTEFMSSDA

SEQ ID NO: 42868 - protein, 10 aa, Artificial Sequence
  Description of Artificial Sequence: Synthetic epitope
RSTESAHAAT

SEQ ID NO: 42869 - protein, 10 aa, Artificial Sequence
  Description of Artificial Sequence: Synthetic epitope
RSTFDLSTSD

SEQ ID NO: 42870 - protein, 10 aa, Artificial Sequence
  Description of Artificial Sequence: Synthetic epitope
RSTGSMSVVS

SEQ ID NO: 42871 - protein, 10 aa, Artificial Sequence
  Description of Artificial Sequence: Synthetic epitope
RSTIDALTSK

SEQ ID NO: 42872 - protein, 10 aa, Artificial Sequence
  Description of Artificial Sequence: Synthetic epitope
RSTITLQLRE

SEQ ID NO: 42873 - protein, 10 aa, Artificial Sequence
  Description of Artificial Sequence: Synthetic epitope
RSTLGDAEAS

SEQ ID NO: 42874 - protein, 10 aa, Artificial Sequence
  Description of Artificial Sequence: Synthetic epitope
RSTLSESMQL

SEQ ID NO: 42875 - protein, 10 aa, Artificial Sequence
  Description of Artificial Sequence: Synthetic epitope
RSTLTGKNAQ

SEQ ID NO: 42876 - protein, 10 aa, Artificial Sequence
  Description of Artificial Sequence: Synthetic epitope
RSTMAATQSS

SEQ ID NO: 42877 - protein, 10 aa, Artificial Sequence
  Description of Artificial Sequence: Synthetic epitope
RSTNDVFKEI

SEQ ID NO: 42878 - protein, 10 aa, Artificial Sequence
  Description of Artificial Sequence: Synthetic epitope
RSTQESLTAG

SEQ ID NO: 42879 - protein, 10 aa, Artificial Sequence
  Description of Artificial Sequence: Synthetic epitope
RSTQQRSALL

SEQ ID NO: 42880 - protein, 10 aa, Artificial Sequence
  Description of Artificial Sequence: Synthetic epitope
RSTRQKTTGS

SEQ ID NO: 42881 - protein, 10 aa, Artificial Sequence
  Description of Artificial Sequence: Synthetic epitope
RSTSDIGSKT

SEQ ID NO: 42882 - protein, 10 aa, Artificial Sequence
  Description of Artificial Sequence: Synthetic epitope
RSTSKSRSAR

SEQ ID NO: 42883 - protein, 10 aa, Artificial Sequence
  Description of Artificial Sequence: Synthetic epitope
RSTSKTRDKK

SEQ ID NO: 42884 - protein, 10 aa, Artificial Sequence
  Description of Artificial Sequence: Synthetic epitope
RSTSKVRKKA

SEQ ID NO: 42885 - protein, 10 aa, Artificial Sequence
  Description of Artificial Sequence: Synthetic epitope
RSTSRSSANW

SEQ ID NO: 42886 - protein, 10 aa, Artificial Sequence
  Description of Artificial Sequence: Synthetic epitope
RSTSSTKSGK

SEQ ID NO: 42887 - protein, 10 aa, Artificial Sequence
  Description of Artificial Sequence: Synthetic epitope
RSTSTRLQPQ

SEQ ID NO: 42888 - protein, 10 aa, Artificial Sequence
  Description of Artificial Sequence: Synthetic epitope
RSTSVSRNQQ

SEQ ID NO: 42889 - protein, 10 aa, Artificial Sequence
  Description of Artificial Sequence: Synthetic epitope
RSTTDPVMSQ

SEQ ID NO: 42890 - protein, 10 aa, Artificial Sequence
  Description of Artificial Sequence: Synthetic epitope
RSTTELPLTV

SEQ ID NO: 42891 - protein, 10 aa, Artificial Sequence
  Description of Artificial Sequence: Synthetic epitope
RSTTVYKQKI

SEQ ID NO: 42892 - protein, 10 aa, Artificial Sequence
  Description of Artificial Sequence: Synthetic epitope
RSTVALTAAG

SEQ ID NO: 42893 - protein, 10 aa, Artificial Sequence
  Description of Artificial Sequence: Synthetic epitope
RSTVLSKNRS

SEQ ID NO: 42894 - protein, 10 aa, Artificial Sequence
  Description of Artificial Sequence: Synthetic epitope
RSTVPLVTRN

SEQ ID NO: 42895 - protein, 10 aa, Artificial Sequence
  Description of Artificial Sequence: Synthetic epitope
RSTVSKSKDP

SEQ ID NO: 42896 - protein, 10 aa, Artificial Sequence
  Description of Artificial Sequence: Synthetic epitope
RSVASSQPAK

SEQ ID NO: 42897 - protein, 10 aa, Artificial Sequence
  Description of Artificial Sequence: Synthetic epitope
RSVEGQAASD

SEQ ID NO: 42898 - protein, 10 aa, Artificial Sequence
  Description of Artificial Sequence: Synthetic epitope
RSVFMSSTTS

SEQ ID NO: 42899 - protein, 10 aa, Artificial Sequence
  Description of Artificial Sequence: Synthetic epitope
RSVGKRKQKK

SEQ ID NO: 42900 - protein, 10 aa, Artificial Sequence
  Description of Artificial Sequence: Synthetic epitope
RSVGSKNNRS

SEQ ID NO: 42901 - protein, 10 aa, Artificial Sequence
  Description of Artificial Sequence: Synthetic epitope
RSVKAKVGTT

SEQ ID NO: 42902 - protein, 10 aa, Artificial Sequence
  Description of Artificial Sequence: Synthetic epitope
RSVLGEADQK

SEQ ID NO: 42903 - protein, 10 aa, Artificial Sequence
  Description of Artificial Sequence: Synthetic epitope
RSVLNKESHS

SEQ ID NO: 42904 - protein, 10 aa, Artificial Sequence
  Description of Artificial Sequence: Synthetic epitope
RSVMQLENGI

SEQ ID NO: 42905 - protein, 10 aa, Artificial Sequence
  Description of Artificial Sequence: Synthetic epitope
RSVNLTEQNS

SEQ ID NO: 42906 - protein, 10 aa, Artificial Sequence
  Description of Artificial Sequence: Synthetic epitope
RSVNRETKVK

SEQ ID NO: 42907 - protein, 10 aa, Artificial Sequence
  Description of Artificial Sequence: Synthetic epitope
RSVQAQARIP

SEQ ID NO: 42908 - protein, 10 aa, Artificial Sequence
  Description of Artificial Sequence: Synthetic epitope
RSVQKSDQQN

SEQ ID NO: 42909 - protein, 10 aa, Artificial Sequence
  Description of Artificial Sequence: Synthetic epitope
RSVQQLRTSF

SEQ ID NO: 42910 - protein, 10 aa, Artificial Sequence
  Description of Artificial Sequence: Synthetic epitope
RSVRAIRIDG

SEQ ID NO: 42911 - protein, 10 aa, Artificial Sequence
  Description of Artificial Sequence: Synthetic epitope
RSVRTRTNLK

SEQ ID NO: 42912 - protein, 10 aa, Artificial Sequence
  Description of Artificial Sequence: Synthetic epitope
RSVSPSQVHH

SEQ ID NO: 42913 - protein, 10 aa, Artificial Sequence
  Description of Artificial Sequence: Synthetic epitope
RSVTGVATKK

SEQ ID NO: 42914 - protein, 10 aa, Artificial Sequence
  Description of Artificial Sequence: Synthetic epitope
RSVTHRQLSE

SEQ ID NO: 42915 - protein, 10 aa, Artificial Sequence
  Description of Artificial Sequence: Synthetic epitope
RSVTRIKKRS

SEQ ID NO: 42916 - protein, 10 aa, Artificial Sequence
  Description of Artificial Sequence: Synthetic epitope
RSVTSMERKE

SEQ ID NO: 42917 - protein, 10 aa, Artificial Sequence
  Description of Artificial Sequence: Synthetic epitope
RSVVRAIPVD

SEQ ID NO: 42918 - protein, 10 aa, Artificial Sequence
  Description of Artificial Sequence: Synthetic epitope
RSVYLMKDKE

SEQ ID NO: 42919 - protein, 10 aa, Artificial Sequence
  Description of Artificial Sequence: Synthetic epitope
RSWGRSLKYN

SEQ ID NO: 42920 - protein, 10 aa, Artificial Sequence
  Description of Artificial Sequence: Synthetic epitope
RSWLIKFKNV

SEQ ID NO: 42921 - protein, 10 aa, Artificial Sequence
  Description of Artificial Sequence: Synthetic epitope
RSWPFNLEEI

SEQ ID NO: 42922 - protein, 10 aa, Artificial Sequence
  Description of Artificial Sequence: Synthetic epitope
RSYAALSQSA

SEQ ID NO: 42923 - protein, 10 aa, Artificial Sequence
  Description of Artificial Sequence: Synthetic epitope
RSYETAENEE

SEQ ID NO: 42924 - protein, 10 aa, Artificial Sequence
  Description of Artificial Sequence: Synthetic epitope
RSYGSRYSES

SEQ ID NO: 42925 - protein, 10 aa, Artificial Sequence
  Description of Artificial Sequence: Synthetic epitope
RSYKEQESKK

SEQ ID NO: 42926 - protein, 10 aa, Artificial Sequence
  Description of Artificial Sequence: Synthetic epitope
RSYNSSVGSE

SEQ ID NO: 42927 - protein, 10 aa, Artificial Sequence
  Description of Artificial Sequence: Synthetic epitope
RSYQTNTADT

SEQ ID NO: 42928 - protein, 10 aa, Artificial Sequence
  Description of Artificial Sequence: Synthetic epitope
RSYRIAKSAA

SEQ ID NO: 42929 - protein, 10 aa, Artificial Sequence
  Description of Artificial Sequence: Synthetic epitope
RSYSFEASEE

SEQ ID NO: 42930 - protein, 10 aa, Artificial Sequence
  Description of Artificial Sequence: Synthetic epitope
RSYSRRIKIE

SEQ ID NO: 42931 - protein, 10 aa, Artificial Sequence
  Description of Artificial Sequence: Synthetic epitope
RSYSRSYTRS

SEQ ID NO: 42932 - protein, 10 aa, Artificial Sequence
  Description of Artificial Sequence: Synthetic epitope
RSYSSNSKKA

SEQ ID NO: 42933 - protein, 10 aa, Artificial Sequence
  Description of Artificial Sequence: Synthetic epitope
RSYSSTSIEE

SEQ ID NO: 42934 - protein, 10 aa, Artificial Sequence
  Description of Artificial Sequence: Synthetic epitope
RSYTSATTKT

SEQ ID NO: 42935 - protein, 10 aa, Artificial Sequence
  Description of Artificial Sequence: Synthetic epitope
RTAARANSPE

SEQ ID NO: 42936 - protein, 10 aa, Artificial Sequence
  Description of Artificial Sequence: Synthetic epitope
RTAEALNLDA

SEQ ID NO: 42937 - protein, 10 aa, Artificial Sequence
  Description of Artificial Sequence: Synthetic epitope
RTAEKTDKEE

SEQ ID NO: 42938 - protein, 10 aa, Artificial Sequence
  Description of Artificial Sequence: Synthetic epitope
RTAHYKLTST

SEQ ID NO: 42939 - protein, 10 aa, Artificial Sequence
  Description of Artificial Sequence: Synthetic epitope
RTAKEVQTIE

SEQ ID NO: 42940 - protein, 10 aa, Artificial Sequence
  Description of Artificial Sequence: Synthetic epitope
RTAKLSAEPV

SEQ ID NO: 42941 - protein, 10 aa, Artificial Sequence
  Description of Artificial Sequence: Synthetic epitope
RTAKVLLNSS

SEQ ID NO: 42942 - protein, 10 aa, Artificial Sequence
  Description of Artificial Sequence: Synthetic epitope
RTALRALSDS

SEQ ID NO: 42943 - protein, 10 aa, Artificial Sequence
  Description of Artificial Sequence: Synthetic epitope
RTALTSSAGS

SEQ ID NO: 42944 - protein, 10 aa, Artificial Sequence
  Description of Artificial Sequence: Synthetic epitope
RTAMSLIERA

SEQ ID NO: 42945 - protein, 10 aa, Artificial Sequence
  Description of Artificial Sequence: Synthetic epitope
RTARKQSAQK

SEQ ID NO: 42946 - protein, 10 aa, Artificial Sequence
  Description of Artificial Sequence: Synthetic epitope
RTARSVQGAQ

SEQ ID NO: 42947 - protein, 10 aa, Artificial Sequence
  Description of Artificial Sequence: Synthetic epitope
RTASATTRVG

SEQ ID NO: 42948 - protein, 10 aa, Artificial Sequence
  Description of Artificial Sequence: Synthetic epitope
RTASGQRQDL

SEQ ID NO: 42949 - protein, 10 aa, Artificial Sequence
  Description of Artificial Sequence: Synthetic epitope
RTASVTYVKS

SEQ ID NO: 42950 - protein, 10 aa, Artificial Sequence
  Description of Artificial Sequence: Synthetic epitope
RTATALADRA

SEQ ID NO: 42951 - protein, 10 aa, Artificial Sequence
  Description of Artificial Sequence: Synthetic epitope
RTATITVLPQ

SEQ ID NO: 42952 - protein, 10 aa, Artificial Sequence
  Description of Artificial Sequence: Synthetic epitope
RTATSVNGAE

SEQ ID NO: 42953 - protein, 10 aa, Artificial Sequence
  Description of Artificial Sequence: Synthetic epitope
RTAVERSRKT

SEQ ID NO: 42954 - protein, 10 aa, Artificial Sequence
  Description of Artificial Sequence: Synthetic epitope
RTAVGKEAGE

SEQ ID NO: 42955 - protein, 10 aa, Artificial Sequence
  Description of Artificial Sequence: Synthetic epitope
RTDAELFSAD

SEQ ID NO: 42956 - protein, 10 aa, Artificial Sequence
  Description of Artificial Sequence: Synthetic epitope
RTDFIKGMKK

SEQ ID NO: 42957 - protein, 10 aa, Artificial Sequence
  Description of Artificial Sequence: Synthetic epitope
RTDPSEQVEG

SEQ ID NO: 42958 - protein, 10 aa, Artificial Sequence
  Description of Artificial Sequence: Synthetic epitope
RTDSARLRAP

SEQ ID NO: 42959 - protein, 10 aa, Artificial Sequence
  Description of Artificial Sequence: Synthetic epitope
RTDTNSSPSR

SEQ ID NO: 42960 - protein, 10 aa, Artificial Sequence
  Description of Artificial Sequence: Synthetic epitope
RTEAAFSYYE

SEQ ID NO: 42961 - protein, 10 aa, Artificial Sequence
  Description of Artificial Sequence: Synthetic epitope
RTEEQLRSSQ

SEQ ID NO: 42962 - protein, 10 aa, Artificial Sequence
  Description of Artificial Sequence: Synthetic epitope
RTEEQMAQQP

SEQ ID NO: 42963 - protein, 10 aa, Artificial Sequence
  Description of Artificial Sequence: Synthetic epitope
RTEERETSRA

SEQ ID NO: 42964 - protein, 10 aa, Artificial Sequence
  Description of Artificial Sequence: Synthetic epitope
RTEETIKFAA

SEQ ID NO: 42965 - protein, 10 aa, Artificial Sequence
  Description of Artificial Sequence: Synthetic epitope
RTEKDVSRKV

SEQ ID NO: 42966 - protein, 10 aa, Artificial Sequence
  Description of Artificial Sequence: Synthetic epitope
RTEKMAVDQD

SEQ ID NO: 42967 - protein, 10 aa, Artificial Sequence
  Description of Artificial Sequence: Synthetic epitope
RTENLKQQRS

SEQ ID NO: 42968 - protein, 10 aa, Artificial Sequence
  Description of Artificial Sequence: Synthetic epitope
RTESALSYYE

SEQ ID NO: 42969 - protein, 10 aa, Artificial Sequence
  Description of Artificial Sequence: Synthetic epitope
RTESSQASDM

SEQ ID NO: 42970 - protein, 10 aa, Artificial Sequence
  Description of Artificial Sequence: Synthetic epitope
RTETTEDERK

SEQ ID NO: 42971 - protein, 10 aa, Artificial Sequence
  Description of Artificial Sequence: Synthetic epitope
RTEVEKAIRM

SEQ ID NO: 42972 - protein, 10 aa, Artificial Sequence
  Description of Artificial Sequence: Synthetic epitope
RTEVTQVNTT

SEQ ID NO: 42973 - protein, 10 aa, Artificial Sequence
  Description of Artificial Sequence: Synthetic epitope
RTFEARRLGS

SEQ ID NO: 42974 - protein, 10 aa, Artificial Sequence
  Description of Artificial Sequence: Synthetic epitope
RTFSRSERAG

SEQ ID NO: 42975 - protein, 10 aa, Artificial Sequence
  Description of Artificial Sequence: Synthetic epitope
RTFSSIPVSR

SEQ ID NO: 42976 - protein, 10 aa, Artificial Sequence
  Description of Artificial Sequence: Synthetic epitope
RTFVQSKKNI

SEQ ID NO: 42977 - protein, 10 aa, Artificial Sequence
  Description of Artificial Sequence: Synthetic epitope
RTGAAVVKVR

SEQ ID NO: 42978 - protein, 10 aa, Artificial Sequence
  Description of Artificial Sequence: Synthetic epitope
RTGMQVRSVR

SEQ ID NO: 42979 - protein, 10 aa, Artificial Sequence
  Description of Artificial Sequence: Synthetic epitope
RTGNVALVEK

SEQ ID NO: 42980 - protein, 10 aa, Artificial Sequence
  Description of Artificial Sequence: Synthetic epitope
RTGQENNLGG

SEQ ID NO: 42981 - protein, 10 aa, Artificial Sequence
  Description of Artificial Sequence: Synthetic epitope
RTGRMLKMEP

SEQ ID NO: 42982 - protein, 10 aa, Artificial Sequence
  Description of Artificial Sequence: Synthetic epitope
RTGTSQSLSS

SEQ ID NO: 42983 - protein, 10 aa, Artificial Sequence
  Description of Artificial Sequence: Synthetic epitope
RTGVIHEKQT

SEQ ID NO: 42984 - protein, 10 aa, Artificial Sequence
  Description of Artificial Sequence: Synthetic epitope
RTGVKVDKAT

SEQ ID NO: 42985 - protein, 10 aa, Artificial Sequence
  Description of Artificial Sequence: Synthetic epitope
RTHDKLLVNQ

SEQ ID NO: 42986 - protein, 10 aa, Artificial Sequence
  Description of Artificial Sequence: Synthetic epitope
RTHEIEKNHV

SEQ ID NO: 42987 - protein, 10 aa, Artificial Sequence
  Description of Artificial Sequence: Synthetic epitope
RTHMYKHAQH

SEQ ID NO: 42988 - protein, 10 aa, Artificial Sequence
  Description of Artificial Sequence: Synthetic epitope
RTHSQEYAHS

SEQ ID NO: 42989 - protein, 10 aa, Artificial Sequence
  Description of Artificial Sequence: Synthetic epitope
RTHWVPQADK

SEQ ID NO: 42990 - protein, 10 aa, Artificial Sequence
  Description of Artificial Sequence: Synthetic epitope
RTIATALEYV

SEQ ID NO: 42991 - protein, 10 aa, Artificial Sequence
  Description of Artificial Sequence: Synthetic epitope
RTIDKKFYKS

SEQ ID NO: 42992 - protein, 10 aa, Artificial Sequence
  Description of Artificial Sequence: Synthetic epitope
RTIEESAANN

SEQ ID NO: 42993 - protein, 10 aa, Artificial Sequence
  Description of Artificial Sequence: Synthetic epitope
RTIELMYSDK

SEQ ID NO: 42994 - protein, 10 aa, Artificial Sequence
  Description of Artificial Sequence: Synthetic epitope
RTIKTLQRTD

SEQ ID NO: 42995 - protein, 10 aa, Artificial Sequence
  Description of Artificial Sequence: Synthetic epitope
RTIRASNNAL

SEQ ID NO: 42996 - protein, 10 aa, Artificial Sequence
  Description of Artificial Sequence: Synthetic epitope
RTIRTARTQA

SEQ ID NO: 42997 - protein, 10 aa, Artificial Sequence
  Description of Artificial Sequence: Synthetic epitope
RTISKNGGAD

SEQ ID NO: 42998 - protein, 10 aa, Artificial Sequence
  Description of Artificial Sequence: Synthetic epitope
RTISVIMKNQ

SEQ ID NO: 42999 - protein, 10 aa, Artificial Sequence
  Description of Artificial Sequence: Synthetic epitope
RTITKQVPNE

SEQ ID NO: 43000 - protein, 10 aa, Artificial Sequence
  Description of Artificial Sequence: Synthetic epitope
RTKAKKDKAQ

SEQ ID NO: 43001 - protein, 10 aa, Artificial Sequence
  Description of Artificial Sequence: Synthetic epitope
RTKASVHTLS

SEQ ID NO: 43002 - protein, 10 aa, Artificial Sequence
  Description of Artificial Sequence: Synthetic epitope
RTKDSQSDAY

SEQ ID NO: 43003 - protein, 10 aa, Artificial Sequence
  Description of Artificial Sequence: Synthetic epitope
RTKELKLSAE

SEQ ID NO: 43004 - protein, 10 aa, Artificial Sequence
  Description of Artificial Sequence: Synthetic epitope
RTKLHKVFRE

SEQ ID NO: 43005 - protein, 10 aa, Artificial Sequence
  Description of Artificial Sequence: Synthetic epitope
RTKLQTSERA

SEQ ID NO: 43006 - protein, 10 aa, Artificial Sequence
  Description of Artificial Sequence: Synthetic epitope
RTKLSSLATA

SEQ ID NO: 43007 - protein, 10 aa, Artificial Sequence
  Description of Artificial Sequence: Synthetic epitope
RTKLTSALKK

SEQ ID NO: 43008 - protein, 10 aa, Artificial Sequence
  Description of Artificial Sequence: Synthetic epitope
RTKNFESGKA

SEQ ID NO: 43009 - protein, 10 aa, Artificial Sequence
  Description of Artificial Sequence: Synthetic epitope
RTKQVEGVTR

SEQ ID NO: 43010 - protein, 10 aa, Artificial Sequence
  Description of Artificial Sequence: Synthetic epitope
RTKSASLSPA

SEQ ID NO: 43011 - protein, 10 aa, Artificial Sequence
  Description of Artificial Sequence: Synthetic epitope
RTKSGSKSSI

SEQ ID NO: 43012 - protein, 10 aa, Artificial Sequence
  Description of Artificial Sequence: Synthetic epitope
RTKSKARSQS

SEQ ID NO: 43013 - protein, 10 aa, Artificial Sequence
  Description of Artificial Sequence: Synthetic epitope
RTKSKASQRK

SEQ ID NO: 43014 - protein, 10 aa, Artificial Sequence
  Description of Artificial Sequence: Synthetic epitope
RTKSSDTSST

SEQ ID NO: 43015 - protein, 10 aa, Artificial Sequence
  Description of Artificial Sequence: Synthetic epitope
RTKVFMTDSM

SEQ ID NO: 43016 - protein, 10 aa, Artificial Sequence
  Description of Artificial Sequence: Synthetic epitope
RTKVQKKSLL

SEQ ID NO: 43017 - protein, 10 aa, Artificial Sequence
  Description of Artificial Sequence: Synthetic epitope
RTKVVYLASE

SEQ ID NO: 43018 - protein, 10 aa, Artificial Sequence
  Description of Artificial Sequence: Synthetic epitope
RTLAKAARAQ

SEQ ID NO: 43019 - protein, 10 aa, Artificial Sequence
  Description of Artificial Sequence: Synthetic epitope
RTLAMVAKGR

SEQ ID NO: 43020 - protein, 10 aa, Artificial Sequence
  Description of Artificial Sequence: Synthetic epitope
RTLAYKANKA

SEQ ID NO: 43021 - protein, 10 aa, Artificial Sequence
  Description of Artificial Sequence: Synthetic epitope
RTLDKVSLEE

SEQ ID NO: 43022 - protein, 10 aa, Artificial Sequence
  Description of Artificial Sequence: Synthetic epitope
RTLEQPRATL

SEQ ID NO: 43023 - protein, 10 aa, Artificial Sequence
  Description of Artificial Sequence: Synthetic epitope
RTLHNMMKKL

SEQ ID NO: 43024 - protein, 10 aa, Artificial Sequence
  Description of Artificial Sequence: Synthetic epitope
RTLIALVQVT

SEQ ID NO: 43025 - protein, 10 aa, Artificial Sequence
  Description of Artificial Sequence: Synthetic epitope
RTLISQSKDT

SEQ ID NO: 43026 - protein, 10 aa, Artificial Sequence
  Description of Artificial Sequence: Synthetic epitope
RTLKRSLQPV

SEQ ID NO: 43027 - protein, 10 aa, Artificial Sequence
  Description of Artificial Sequence: Synthetic epitope
RTLKTQLVKQ

SEQ ID NO: 43028 - protein, 10 aa, Artificial Sequence
  Description of Artificial Sequence: Synthetic epitope
RTLLKETKFI

SEQ ID NO: 43029 - protein, 10 aa, Artificial Sequence
  Description of Artificial Sequence: Synthetic epitope
RTLLRATNAN

SEQ ID NO: 43030 - protein, 10 aa, Artificial Sequence
  Description of Artificial Sequence: Synthetic epitope
RTLMEQPLTT

SEQ ID NO: 43031 - protein, 10 aa, Artificial Sequence
  Description of Artificial Sequence: Synthetic epitope
RTLMTIEKDQ

SEQ ID NO: 43032 - protein, 10 aa, Artificial Sequence
  Description of Artificial Sequence: Synthetic epitope
RTLQLTSDSE

SEQ ID NO: 43033 - protein, 10 aa, Artificial Sequence
  Description of Artificial Sequence: Synthetic epitope
RTLQQIKKSS

SEQ ID NO: 43034 - protein, 10 aa, Artificial Sequence
  Description of Artificial Sequence: Synthetic epitope
RTLQSALEAL

SEQ ID NO: 43035 - protein, 10 aa, Artificial Sequence
  Description of Artificial Sequence: Synthetic epitope
RTLRTIVREE

SEQ ID NO: 43036 - protein, 10 aa, Artificial Sequence
  Description of Artificial Sequence: Synthetic epitope
RTLSAKAASG

SEQ ID NO: 43037 - protein, 10 aa, Artificial Sequence
  Description of Artificial Sequence: Synthetic epitope
RTLSEKRAPV

SEQ ID NO: 43038 - protein, 10 aa, Artificial Sequence
  Description of Artificial Sequence: Synthetic epitope
RTLSILFQQR

SEQ ID NO: 43039 - protein, 10 aa, Artificial Sequence
  Description of Artificial Sequence: Synthetic epitope
RTLSKSVQTI

SEQ ID NO: 43040 - protein, 10 aa, Artificial Sequence
  Description of Artificial Sequence: Synthetic epitope
RTLSLIRKTS

SEQ ID NO: 43041 - protein, 10 aa, Artificial Sequence
  Description of Artificial Sequence: Synthetic epitope
RTLSQDTAVT

SEQ ID NO: 43042 - protein, 10 aa, Artificial Sequence
  Description of Artificial Sequence: Synthetic epitope
RTLTAKEELL

SEQ ID NO: 43043 - protein, 10 aa, Artificial Sequence
  Description of Artificial Sequence: Synthetic epitope
RTLTASENES

SEQ ID NO: 43044 - protein, 10 aa, Artificial Sequence
  Description of Artificial Sequence: Synthetic epitope
RTLVTIMPQG

SEQ ID NO: 43045 - protein, 10 aa, Artificial Sequence
  Description of Artificial Sequence: Synthetic epitope
RTLVTLEQSR

SEQ ID NO: 43046 - protein, 10 aa, Artificial Sequence
  Description of Artificial Sequence: Synthetic epitope
RTLYTQIRNR

SEQ ID NO: 43047 - protein, 10 aa, Artificial Sequence
  Description of Artificial Sequence: Synthetic epitope
RTMEIYSKTT

SEQ ID NO: 43048 - protein, 10 aa, Artificial Sequence
  Description of Artificial Sequence: Synthetic epitope
RTMEKESKTT

SEQ ID NO: 43049 - protein, 10 aa, Artificial Sequence
  Description of Artificial Sequence: Synthetic epitope
RTMKDDETFE

SEQ ID NO: 43050 - protein, 10 aa, Artificial Sequence
  Description of Artificial Sequence: Synthetic epitope
RTMLRMSEIT

SEQ ID NO: 43051 - protein, 10 aa, Artificial Sequence
  Description of Artificial Sequence: Synthetic epitope
RTMNTEKLLK

SEQ ID NO: 43052 - protein, 10 aa, Artificial Sequence
  Description of Artificial Sequence: Synthetic epitope
RTMQPLAVLA

SEQ ID NO: 43053 - protein, 10 aa, Artificial Sequence
  Description of Artificial Sequence: Synthetic epitope
RTMRMSRHSS

SEQ ID NO: 43054 - protein, 10 aa, Artificial Sequence
  Description of Artificial Sequence: Synthetic epitope
RTMVSQQEKG

SEQ ID NO: 43055 - protein, 10 aa, Artificial Sequence
  Description of Artificial Sequence: Synthetic epitope
RTNEIITGAT

SEQ ID NO: 43056 - protein, 10 aa, Artificial Sequence
  Description of Artificial Sequence: Synthetic epitope
RTNIGIQEFM

SEQ ID NO: 43057 - protein, 10 aa, Artificial Sequence
  Description of Artificial Sequence: Synthetic epitope
RTNSISRQKQ

SEQ ID NO: 43058 - protein, 10 aa, Artificial Sequence
  Description of Artificial Sequence: Synthetic epitope
RTNTLSKANK

SEQ ID NO: 43059 - protein, 10 aa, Artificial Sequence
  Description of Artificial Sequence: Synthetic epitope
RTPASRSGAD

SEQ ID NO: 43060 - protein, 10 aa, Artificial Sequence
  Description of Artificial Sequence: Synthetic epitope
RTPAVRAPAR

SEQ ID NO: 43061 - protein, 10 aa, Artificial Sequence
  Description of Artificial Sequence: Synthetic epitope
RTPRKTSRMH

SEQ ID NO: 43062 - protein, 10 aa, Artificial Sequence
  Description of Artificial Sequence: Synthetic epitope
RTQAKAAKAR

SEQ ID NO: 43063 - protein, 10 aa, Artificial Sequence
  Description of Artificial Sequence: Synthetic epitope
RTQASLDKHN

SEQ ID NO: 43064 - protein, 10 aa, Artificial Sequence
  Description of Artificial Sequence: Synthetic epitope
RTQGGANAHK

SEQ ID NO: 43065 - protein, 10 aa, Artificial Sequence
  Description of Artificial Sequence: Synthetic epitope
RTQMLNSDSA

SEQ ID NO: 43066 - protein, 10 aa, Artificial Sequence
  Description of Artificial Sequence: Synthetic epitope
RTQQEAKVSE

SEQ ID NO: 43067 - protein, 10 aa, Artificial Sequence
  Description of Artificial Sequence: Synthetic epitope
RTQQTSSQMP

SEQ ID NO: 43068 - protein, 10 aa, Artificial Sequence
  Description of Artificial Sequence: Synthetic epitope
RTQRITGGEQ

SEQ ID NO: 43069 - protein, 10 aa, Artificial Sequence
  Description of Artificial Sequence: Synthetic epitope
RTQRRSKLKE

SEQ ID NO: 43070 - protein, 10 aa, Artificial Sequence
  Description of Artificial Sequence: Synthetic epitope
RTQSAGEVAK

SEQ ID NO: 43071 - protein, 10 aa, Artificial Sequence
  Description of Artificial Sequence: Synthetic epitope
RTQSTGNTHD

SEQ ID NO: 43072 - protein, 10 aa, Artificial Sequence
  Description of Artificial Sequence: Synthetic epitope
RTQSVNLPKE

SEQ ID NO: 43073 - protein, 10 aa, Artificial Sequence
  Description of Artificial Sequence: Synthetic epitope
RTRAKEIEVK

SEQ ID NO: 43074 - protein, 10 aa, Artificial Sequence
  Description of Artificial Sequence: Synthetic epitope
RTRALSLASS

SEQ ID NO: 43075 - protein, 10 aa, Artificial Sequence
  Description of Artificial Sequence: Synthetic epitope
RTRAREVIEA

SEQ ID NO: 43076 - protein, 10 aa, Artificial Sequence
  Description of Artificial Sequence: Synthetic epitope
RTRASVRTQW

SEQ ID NO: 43077 - protein, 10 aa, Artificial Sequence
  Description of Artificial Sequence: Synthetic epitope
RTRIVLADVK

SEQ ID NO: 43078 - protein, 10 aa, Artificial Sequence
  Description of Artificial Sequence: Synthetic epitope
RTRKASQQSN

SEQ ID NO: 43079 - protein, 10 aa, Artificial Sequence
  Description of Artificial Sequence: Synthetic epitope
RTRKKVTKPY

SEQ ID NO: 43080 - protein, 10 aa, Artificial Sequence
  Description of Artificial Sequence: Synthetic epitope
RTRMLKIKDK

SEQ ID NO: 43081 - protein, 10 aa, Artificial Sequence
  Description of Artificial Sequence: Synthetic epitope
RTRNVSKSLE

SEQ ID NO: 43082 - protein, 10 aa, Artificial Sequence
  Description of Artificial Sequence: Synthetic epitope
RTRRISQTSQ

SEQ ID NO: 43083 - protein, 10 aa, Artificial Sequence
  Description of Artificial Sequence: Synthetic epitope
RTRSRAVEIF

SEQ ID NO: 43084 - protein, 10 aa, Artificial Sequence
  Description of Artificial Sequence: Synthetic epitope
RTRVQRPIVR

SEQ ID NO: 43085 - protein, 10 aa, Artificial Sequence
  Description of Artificial Sequence: Synthetic epitope
RTSGKELVKQ

SEQ ID NO: 43086 - protein, 10 aa, Artificial Sequence
  Description of Artificial Sequence: Synthetic epitope
RTSGSQARAT

SEQ ID NO: 43087 - protein, 10 aa, Artificial Sequence
  Description of Artificial Sequence: Synthetic epitope
RTSIIDAVEL

SEQ ID NO: 43088 - protein, 10 aa, Artificial Sequence
  Description of Artificial Sequence: Synthetic epitope
RTSIYHYLFE

SEQ ID NO: 43089 - protein, 10 aa, Artificial Sequence
  Description of Artificial Sequence: Synthetic epitope
RTSKESMSEA

SEQ ID NO: 43090 - protein, 10 aa, Artificial Sequence
  Description of Artificial Sequence: Synthetic epitope
RTSKRTELAQ

SEQ ID NO: 43091 - protein, 10 aa, Artificial Sequence
  Description of Artificial Sequence: Synthetic epitope
RTSLDALKIS

SEQ ID NO: 43092 - protein, 10 aa, Artificial Sequence
  Description of Artificial Sequence: Synthetic epitope
RTSLTVSSAT

SEQ ID NO: 43093 - protein, 10 aa, Artificial Sequence
  Description of Artificial Sequence: Synthetic epitope
RTSLVSTIAG

SEQ ID NO: 43094 - protein, 10 aa, Artificial Sequence
  Description of Artificial Sequence: Synthetic epitope
RTSQQKMELE

SEQ ID NO: 43095 - protein, 10 aa, Artificial Sequence
  Description of Artificial Sequence: Synthetic epitope
RTSQWPQMSQ

SEQ ID NO: 43096 - protein, 10 aa, Artificial Sequence
  Description of Artificial Sequence: Synthetic epitope
RTSRKAKEYK

SEQ ID NO: 43097 - protein, 10 aa, Artificial Sequence
  Description of Artificial Sequence: Synthetic epitope
RTSRQVQVLQ

SEQ ID NO: 43098 - protein, 10 aa, Artificial Sequence
  Description of Artificial Sequence: Synthetic epitope
RTSSGRSESN

SEQ ID NO: 43099 - protein, 10 aa, Artificial Sequence
  Description of Artificial Sequence: Synthetic epitope
RTSSKTAFYQ

SEQ ID NO: 43100 - protein, 10 aa, Artificial Sequence
  Description of Artificial Sequence: Synthetic epitope
RTSSLARAKR

SEQ ID NO: 43101 - protein, 10 aa, Artificial Sequence
  Description of Artificial Sequence: Synthetic epitope
RTSSQSKGNK

SEQ ID NO: 43102 - protein, 10 aa, Artificial Sequence
  Description of Artificial Sequence: Synthetic epitope
RTSTIKNHEF

SEQ ID NO: 43103 - protein, 10 aa, Artificial Sequence
  Description of Artificial Sequence: Synthetic epitope
RTSTKEMSDN

SEQ ID NO: 43104 - protein, 10 aa, Artificial Sequence
  Description of Artificial Sequence: Synthetic epitope
RTSTNLNSQQ

SEQ ID NO: 43105 - protein, 10 aa, Artificial Sequence
  Description of Artificial Sequence: Synthetic epitope
RTSVEAAVAP

SEQ ID NO: 43106 - protein, 10 aa, Artificial Sequence
  Description of Artificial Sequence: Synthetic epitope
RTSVGSSEKG

SEQ ID NO: 43107 - protein, 10 aa, Artificial Sequence
  Description of Artificial Sequence: Synthetic epitope
RTTAASNKKG

SEQ ID NO: 43108 - protein, 10 aa, Artificial Sequence
  Description of Artificial Sequence: Synthetic epitope
RTTALAAGRT

SEQ ID NO: 43109 - protein, 10 aa, Artificial Sequence
  Description of Artificial Sequence: Synthetic epitope
RTTANHDSEN

SEQ ID NO: 43110 - protein, 10 aa, Artificial Sequence
  Description of Artificial Sequence: Synthetic epitope
RTTATATPSK

SEQ ID NO: 43111 - protein, 10 aa, Artificial Sequence
  Description of Artificial Sequence: Synthetic epitope
RTTATATPSK

SEQ ID NO: 43112 - protein, 10 aa, Artificial Sequence
  Description of Artificial Sequence: Synthetic epitope
RTTATATPSK

SEQ ID NO: 43113 - protein, 10 aa, Artificial Sequence
  Description of Artificial Sequence: Synthetic epitope
RTTATATPSK

SEQ ID NO: 43114 - protein, 10 aa, Artificial Sequence
  Description of Artificial Sequence: Synthetic epitope
RTTKKRIPNT

SEQ ID NO: 43115 - protein, 10 aa, Artificial Sequence
  Description of Artificial Sequence: Synthetic epitope
RTTKRLSVTS

SEQ ID NO: 43116 - protein, 10 aa, Artificial Sequence
  Description of Artificial Sequence: Synthetic epitope
RTTLSSKMYH

SEQ ID NO: 43117 - protein, 10 aa, Artificial Sequence
  Description of Artificial Sequence: Synthetic epitope
RTTLTFKRRF

SEQ ID NO: 43118 - protein, 10 aa, Artificial Sequence
  Description of Artificial Sequence: Synthetic epitope
RTTQEKLKTS

SEQ ID NO: 43119 - protein, 10 aa, Artificial Sequence
  Description of Artificial Sequence: Synthetic epitope
RTTQPSPKKT

SEQ ID NO: 43120 - protein, 10 aa, Artificial Sequence
  Description of Artificial Sequence: Synthetic epitope
RTTRTTKDSA

SEQ ID NO: 43121 - protein, 10 aa, Artificial Sequence
  Description of Artificial Sequence: Synthetic epitope
RTTSTKTGEA

SEQ ID NO: 43122 - protein, 10 aa, Artificial Sequence
  Description of Artificial Sequence: Synthetic epitope
RTTSVRSEAG

SEQ ID NO: 43123 - protein, 10 aa, Artificial Sequence
  Description of Artificial Sequence: Synthetic epitope
RTTSYTIDQA

SEQ ID NO: 43124 - protein, 10 aa, Artificial Sequence
  Description of Artificial Sequence: Synthetic epitope
RTTVFKSVTN

SEQ ID NO: 43125 - protein, 10 aa, Artificial Sequence
  Description of Artificial Sequence: Synthetic epitope
RTTVFQYPVG

SEQ ID NO: 43126 - protein, 10 aa, Artificial Sequence
  Description of Artificial Sequence: Synthetic epitope
RTVALKGPVT

SEQ ID NO: 43127 - protein, 10 aa, Artificial Sequence
  Description of Artificial Sequence: Synthetic epitope
RTVDEMKGAL

SEQ ID NO: 43128 - protein, 10 aa, Artificial Sequence
  Description of Artificial Sequence: Synthetic epitope
RTVEASLEAV

SEQ ID NO: 43129 - protein, 10 aa, Artificial Sequence
  Description of Artificial Sequence: Synthetic epitope
RTVESAHVQR

SEQ ID NO: 43130 - protein, 10 aa, Artificial Sequence
  Description of Artificial Sequence: Synthetic epitope
RTVIAKFQNK

SEQ ID NO: 43131 - protein, 10 aa, Artificial Sequence
  Description of Artificial Sequence: Synthetic epitope
RTVQISDLET

SEQ ID NO: 43132 - protein, 10 aa, Artificial Sequence
  Description of Artificial Sequence: Synthetic epitope
RTVQQVNLVY

SEQ ID NO: 43133 - protein, 10 aa, Artificial Sequence
  Description of Artificial Sequence: Synthetic epitope
RTVRLHIAES

SEQ ID NO: 43134 - protein, 10 aa, Artificial Sequence
  Description of Artificial Sequence: Synthetic epitope
RTVRSENLEQ

SEQ ID NO: 43135 - protein, 10 aa, Artificial Sequence
  Description of Artificial Sequence: Synthetic epitope
RTVRTSQATP

SEQ ID NO: 43136 - protein, 10 aa, Artificial Sequence
  Description of Artificial Sequence: Synthetic epitope
RTVSKALALR

SEQ ID NO: 43137 - protein, 10 aa, Artificial Sequence
  Description of Artificial Sequence: Synthetic epitope
RTVTKTVSND

SEQ ID NO: 43138 - protein, 10 aa, Artificial Sequence
  Description of Artificial Sequence: Synthetic epitope
RTVYKAVPEL

SEQ ID NO: 43139 - protein, 10 aa, Artificial Sequence
  Description of Artificial Sequence: Synthetic epitope
RTWPHFTATV

SEQ ID NO: 43140 - protein, 10 aa, Artificial Sequence
  Description of Artificial Sequence: Synthetic epitope
RTWPSATSWE

SEQ ID NO: 43141 - protein, 10 aa, Artificial Sequence
  Description of Artificial Sequence: Synthetic epitope
RTWSPNSAVN

SEQ ID NO: 43142 - protein, 10 aa, Artificial Sequence
  Description of Artificial Sequence: Synthetic epitope
RTYLTITDTQ

SEQ ID NO: 43143 - protein, 10 aa, Artificial Sequence
  Description of Artificial Sequence: Synthetic epitope
RTYNSSQSIG

SEQ ID NO: 43144 - protein, 10 aa, Artificial Sequence
  Description of Artificial Sequence: Synthetic epitope
RTYREEREIH

SEQ ID NO: 43145 - protein, 10 aa, Artificial Sequence
  Description of Artificial Sequence: Synthetic epitope
RTYSFTSAMS

SEQ ID NO: 43146 - protein, 10 aa, Artificial Sequence
  Description of Artificial Sequence: Synthetic epitope
RVAARVQRRP

SEQ ID NO: 43147 - protein, 10 aa, Artificial Sequence
  Description of Artificial Sequence: Synthetic epitope
RVAASASLSN

SEQ ID NO: 43148 - protein, 10 aa, Artificial Sequence
  Description of Artificial Sequence: Synthetic epitope
RVAASRTKAK

SEQ ID NO: 43149 - protein, 10 aa, Artificial Sequence
  Description of Artificial Sequence: Synthetic epitope
RVADKASEKA

SEQ ID NO: 43150 - protein, 10 aa, Artificial Sequence
  Description of Artificial Sequence: Synthetic epitope
RVADTVFLVG

SEQ ID NO: 43151 - protein, 10 aa, Artificial Sequence
  Description of Artificial Sequence: Synthetic epitope
RVAFKLRINK

SEQ ID NO: 43152 - protein, 10 aa, Artificial Sequence
  Description of Artificial Sequence: Synthetic epitope
RVAKAFQPSQ

SEQ ID NO: 43153 - protein, 10 aa, Artificial Sequence
  Description of Artificial Sequence: Synthetic epitope
RVALEFSGSL

SEQ ID NO: 43154 - protein, 10 aa, Artificial Sequence
  Description of Artificial Sequence: Synthetic epitope
RVALSVQLQE

SEQ ID NO: 43155 - protein, 10 aa, Artificial Sequence
  Description of Artificial Sequence: Synthetic epitope
RVAQYARAQH

SEQ ID NO: 43156 - protein, 10 aa, Artificial Sequence
  Description of Artificial Sequence: Synthetic epitope
RVASALSSGS

SEQ ID NO: 43157 - protein, 10 aa, Artificial Sequence
  Description of Artificial Sequence: Synthetic epitope
RVASSTLLDD

SEQ ID NO: 43158 - protein, 10 aa, Artificial Sequence
  Description of Artificial Sequence: Synthetic epitope
RVATQAVEDV

SEQ ID NO: 43159 - protein, 10 aa, Artificial Sequence
  Description of Artificial Sequence: Synthetic epitope
RVAVEKVQLA

SEQ ID NO: 43160 - protein, 10 aa, Artificial Sequence
  Description of Artificial Sequence: Synthetic epitope
RVDASASARD

SEQ ID NO: 43161 - protein, 10 aa, Artificial Sequence
  Description of Artificial Sequence: Synthetic epitope
RVDAVSSLSK

SEQ ID NO: 43162 - protein, 10 aa, Artificial Sequence
  Description of Artificial Sequence: Synthetic epitope
RVDESESVHP

SEQ ID NO: 43163 - protein, 10 aa, Artificial Sequence
  Description of Artificial Sequence: Synthetic epitope
RVDTAKLQHR

SEQ ID NO: 43164 - protein, 10 aa, Artificial Sequence
  Description of Artificial Sequence: Synthetic epitope
RVEAELLRRE

SEQ ID NO: 43165 - protein, 10 aa, Artificial Sequence
  Description of Artificial Sequence: Synthetic epitope
RVELEAVSEQ

SEQ ID NO: 43166 - protein, 10 aa, Artificial Sequence
  Description of Artificial Sequence: Synthetic epitope
RVELTEESEK

SEQ ID NO: 43167 - protein, 10 aa, Artificial Sequence
  Description of Artificial Sequence: Synthetic epitope
RVELVAMNET

SEQ ID NO: 43168 - protein, 10 aa, Artificial Sequence
  Description of Artificial Sequence: Synthetic epitope
RVERALPKLT

SEQ ID NO: 43169 - protein, 10 aa, Artificial Sequence
  Description of Artificial Sequence: Synthetic epitope
RVESEVDTEL

SEQ ID NO: 43170 - protein, 10 aa, Artificial Sequence
  Description of Artificial Sequence: Synthetic epitope
RVESSGKISE

SEQ ID NO: 43171 - protein, 10 aa, Artificial Sequence
  Description of Artificial Sequence: Synthetic epitope
RVESTADDLG

SEQ ID NO: 43172 - protein, 10 aa, Artificial Sequence
  Description of Artificial Sequence: Synthetic epitope
RVETHATATP

SEQ ID NO: 43173 - protein, 10 aa, Artificial Sequence
  Description of Artificial Sequence: Synthetic epitope
RVFKKSMSLP

SEQ ID NO: 43174 - protein, 10 aa, Artificial Sequence
  Description of Artificial Sequence: Synthetic epitope
RVFMKMFRFK

SEQ ID NO: 43175 - protein, 10 aa, Artificial Sequence
  Description of Artificial Sequence: Synthetic epitope
RVFQNRFSTQ

SEQ ID NO: 43176 - protein, 10 aa, Artificial Sequence
  Description of Artificial Sequence: Synthetic epitope
RVFRIDAYMA

SEQ ID NO: 43177 - protein, 10 aa, Artificial Sequence
  Description of Artificial Sequence: Synthetic epitope
RVGKQLASQK

SEQ ID NO: 43178 - protein, 10 aa, Artificial Sequence
  Description of Artificial Sequence: Synthetic epitope
RVGTTLAAPK

SEQ ID NO: 43179 - protein, 10 aa, Artificial Sequence
  Description of Artificial Sequence: Synthetic epitope
RVHAALVYHK

SEQ ID NO: 43180 - protein, 10 aa, Artificial Sequence
  Description of Artificial Sequence: Synthetic epitope
RVHANVDLWD

SEQ ID NO: 43181 - protein, 10 aa, Artificial Sequence
  Description of Artificial Sequence: Synthetic epitope
RVIGLLASHK

SEQ ID NO: 43182 - protein, 10 aa, Artificial Sequence
  Description of Artificial Sequence: Synthetic epitope
RVIMQEVEHA

SEQ ID NO: 43183 - protein, 10 aa, Artificial Sequence
  Description of Artificial Sequence: Synthetic epitope
RVITALVERT

SEQ ID NO: 43184 - protein, 10 aa, Artificial Sequence
  Description of Artificial Sequence: Synthetic epitope
RVITYAQRQA

SEQ ID NO: 43185 - protein, 10 aa, Artificial Sequence
  Description of Artificial Sequence: Synthetic epitope
RVKAAQRLEG

SEQ ID NO: 43186 - protein, 10 aa, Artificial Sequence
  Description of Artificial Sequence: Synthetic epitope
RVKFSRSADA

SEQ ID NO: 43187 - protein, 10 aa, Artificial Sequence
  Description of Artificial Sequence: Synthetic epitope
RVKGSTIVSS

SEQ ID NO: 43188 - protein, 10 aa, Artificial Sequence
  Description of Artificial Sequence: Synthetic epitope
RVKISTMLIE

SEQ ID NO: 43189 - protein, 10 aa, Artificial Sequence
  Description of Artificial Sequence: Synthetic epitope
RVKLRVRKSQ

SEQ ID NO: 43190 - protein, 10 aa, Artificial Sequence
  Description of Artificial Sequence: Synthetic epitope
RVKNKTVFQV

SEQ ID NO: 43191 - protein, 10 aa, Artificial Sequence
  Description of Artificial Sequence: Synthetic epitope
RVKRPQLMQQ

SEQ ID NO: 43192 - protein, 10 aa, Artificial Sequence
  Description of Artificial Sequence: Synthetic epitope
RVKSREVHTK

SEQ ID NO: 43193 - protein, 10 aa, Artificial Sequence
  Description of Artificial Sequence: Synthetic epitope
RVKTSSKAKV

SEQ ID NO: 43194 - protein, 10 aa, Artificial Sequence
  Description of Artificial Sequence: Synthetic epitope
RVLAQMSKAS

SEQ ID NO: 43195 - protein, 10 aa, Artificial Sequence
  Description of Artificial Sequence: Synthetic epitope
RVLDGKLSSE

SEQ ID NO: 43196 - protein, 10 aa, Artificial Sequence
  Description of Artificial Sequence: Synthetic epitope
RVLEVGALQA

SEQ ID NO: 43197 - protein, 10 aa, Artificial Sequence
  Description of Artificial Sequence: Synthetic epitope
RVLFKYFEVP

SEQ ID NO: 43198 - protein, 10 aa, Artificial Sequence
  Description of Artificial Sequence: Synthetic epitope
RVLGSSVAGL

SEQ ID NO: 43199 - protein, 10 aa, Artificial Sequence
  Description of Artificial Sequence: Synthetic epitope
RVLKILQEVT

SEQ ID NO: 43200 - protein, 10 aa, Artificial Sequence
  Description of Artificial Sequence: Synthetic epitope
RVLKKNPLKN

SEQ ID NO: 43201 - protein, 10 aa, Artificial Sequence
  Description of Artificial Sequence: Synthetic epitope
RVLKMLSAHT

SEQ ID NO: 43202 - protein, 10 aa, Artificial Sequence
  Description of Artificial Sequence: Synthetic epitope
RVLLALREAD

SEQ ID NO: 43203 - protein, 10 aa, Artificial Sequence
  Description of Artificial Sequence: Synthetic epitope
RVLLVLTSHR

SEQ ID NO: 43204 - protein, 10 aa, Artificial Sequence
  Description of Artificial Sequence: Synthetic epitope
RVLPAVLTRL

SEQ ID NO: 43205 - protein, 10 aa, Artificial Sequence
  Description of Artificial Sequence: Synthetic epitope
RVLQQTMTKQ

SEQ ID NO: 43206 - protein, 10 aa, Artificial Sequence
  Description of Artificial Sequence: Synthetic epitope
RVLRNHSQRQ

SEQ ID NO: 43207 - protein, 10 aa, Artificial Sequence
  Description of Artificial Sequence: Synthetic epitope
RVLRRVAQKS

SEQ ID NO: 43208 - protein, 10 aa, Artificial Sequence
  Description of Artificial Sequence: Synthetic epitope
RVLVIPSSNV

SEQ ID NO: 43209 - protein, 10 aa, Artificial Sequence
  Description of Artificial Sequence: Synthetic epitope
RVMEIEGAGN

SEQ ID NO: 43210 - protein, 10 aa, Artificial Sequence
  Description of Artificial Sequence: Synthetic epitope
RVMEVFLAQL

SEQ ID NO: 43211 - protein, 10 aa, Artificial Sequence
  Description of Artificial Sequence: Synthetic epitope
RVNENELQQD

SEQ ID NO: 43212 - protein, 10 aa, Artificial Sequence
  Description of Artificial Sequence: Synthetic epitope
RVNKLLFAAH

SEQ ID NO: 43213 - protein, 10 aa, Artificial Sequence
  Description of Artificial Sequence: Synthetic epitope
RVNLNVLREA

SEQ ID NO: 43214 - protein, 10 aa, Artificial Sequence
  Description of Artificial Sequence: Synthetic epitope
RVNLSPNRNQ

SEQ ID NO: 43215 - protein, 10 aa, Artificial Sequence
  Description of Artificial Sequence: Synthetic epitope
RVNPVTSLSE

SEQ ID NO: 43216 - protein, 10 aa, Artificial Sequence
  Description of Artificial Sequence: Synthetic epitope
RVNQMPVEVQ

SEQ ID NO: 43217 - protein, 10 aa, Artificial Sequence
  Description of Artificial Sequence: Synthetic epitope
RVNTSKLEKQ

SEQ ID NO: 43218 - protein, 10 aa, Artificial Sequence
  Description of Artificial Sequence: Synthetic epitope
RVPKNTTKKY

SEQ ID NO: 43219 - protein, 10 aa, Artificial Sequence
  Description of Artificial Sequence: Synthetic epitope
RVPKYIFRHN

SEQ ID NO: 43220 - protein, 10 aa, Artificial Sequence
  Description of Artificial Sequence: Synthetic epitope
RVPRAATSRT

SEQ ID NO: 43221 - protein, 10 aa, Artificial Sequence
  Description of Artificial Sequence: Synthetic epitope
RVPVATSVKE

SEQ ID NO: 43222 - protein, 10 aa, Artificial Sequence
  Description of Artificial Sequence: Synthetic epitope
RVPVERKAEE

SEQ ID NO: 43223 - protein, 10 aa, Artificial Sequence
  Description of Artificial Sequence: Synthetic epitope
RVQAKEEINE

SEQ ID NO: 43224 - protein, 10 aa, Artificial Sequence
  Description of Artificial Sequence: Synthetic epitope
RVQAVLTSDS

SEQ ID NO: 43225 - protein, 10 aa, Artificial Sequence
  Description of Artificial Sequence: Synthetic epitope
RVQGELSESN

SEQ ID NO: 43226 - protein, 10 aa, Artificial Sequence
  Description of Artificial Sequence: Synthetic epitope
RVQKLSSFQR

SEQ ID NO: 43227 - protein, 10 aa, Artificial Sequence
  Description of Artificial Sequence: Synthetic epitope
RVQKYFIKLT

SEQ ID NO: 43228 - protein, 10 aa, Artificial Sequence
  Description of Artificial Sequence: Synthetic epitope
RVQLKALVKQ

SEQ ID NO: 43229 - protein, 10 aa, Artificial Sequence
  Description of Artificial Sequence: Synthetic epitope
RVQLNVFDEQ

SEQ ID NO: 43230 - protein, 10 aa, Artificial Sequence
  Description of Artificial Sequence: Synthetic epitope
RVQMILVPQP

SEQ ID NO: 43231 - protein, 10 aa, Artificial Sequence
  Description of Artificial Sequence: Synthetic epitope
RVQMVSRTEE

SEQ ID NO: 43232 - protein, 10 aa, Artificial Sequence
  Description of Artificial Sequence: Synthetic epitope
RVQQPAKSRE

SEQ ID NO: 43233 - protein, 10 aa, Artificial Sequence
  Description of Artificial Sequence: Synthetic epitope
RVQQSSESST

SEQ ID NO: 43234 - protein, 10 aa, Artificial Sequence
  Description of Artificial Sequence: Synthetic epitope
RVQQSTDERM

SEQ ID NO: 43235 - protein, 10 aa, Artificial Sequence
  Description of Artificial Sequence: Synthetic epitope
RVQQSTDERM

SEQ ID NO: 43236 - protein, 10 aa, Artificial Sequence
  Description of Artificial Sequence: Synthetic epitope
RVQRNIGSFE

SEQ ID NO: 43237 - protein, 10 aa, Artificial Sequence
  Description of Artificial Sequence: Synthetic epitope
RVQRSIRLVS

SEQ ID NO: 43238 - protein, 10 aa, Artificial Sequence
  Description of Artificial Sequence: Synthetic epitope
RVRAKLSAPL

SEQ ID NO: 43239 - protein, 10 aa, Artificial Sequence
  Description of Artificial Sequence: Synthetic epitope
RVRAQRLPEV

SEQ ID NO: 43240 - protein, 10 aa, Artificial Sequence
  Description of Artificial Sequence: Synthetic epitope
RVRDDLRFRG

SEQ ID NO: 43241 - protein, 10 aa, Artificial Sequence
  Description of Artificial Sequence: Synthetic epitope
RVREAAEKAK

SEQ ID NO: 43242 - protein, 10 aa, Artificial Sequence
  Description of Artificial Sequence: Synthetic epitope
RVRLAEAEET

SEQ ID NO: 43243 - protein, 10 aa, Artificial Sequence
  Description of Artificial Sequence: Synthetic epitope
RVRRASISEP

SEQ ID NO: 43244 - protein, 10 aa, Artificial Sequence
  Description of Artificial Sequence: Synthetic epitope
RVRRGITKAG

SEQ ID NO: 43245 - protein, 10 aa, Artificial Sequence
  Description of Artificial Sequence: Synthetic epitope
RVRRSRSQTP

SEQ ID NO: 43246 - protein, 10 aa, Artificial Sequence
  Description of Artificial Sequence: Synthetic epitope
RVRRSRSQTP

SEQ ID NO: 43247 - protein, 10 aa, Artificial Sequence
  Description of Artificial Sequence: Synthetic epitope
RVRSEAELQQ

SEQ ID NO: 43248 - protein, 10 aa, Artificial Sequence
  Description of Artificial Sequence: Synthetic epitope
RVRSKSFLQV

SEQ ID NO: 43249 - protein, 10 aa, Artificial Sequence
  Description of Artificial Sequence: Synthetic epitope
RVRSLVLSSA

SEQ ID NO: 43250 - protein, 10 aa, Artificial Sequence
  Description of Artificial Sequence: Synthetic epitope
RVRTSARAGS

SEQ ID NO: 43251 - protein, 10 aa, Artificial Sequence
  Description of Artificial Sequence: Synthetic epitope
RVRVLGLKAH

SEQ ID NO: 43252 - protein, 10 aa, Artificial Sequence
  Description of Artificial Sequence: Synthetic epitope
RVRYTNWAAD

SEQ ID NO: 43253 - protein, 10 aa, Artificial Sequence
  Description of Artificial Sequence: Synthetic epitope
RVRYTNWAAD

SEQ ID NO: 43254 - protein, 10 aa, Artificial Sequence
  Description of Artificial Sequence: Synthetic epitope
RVSAVISTNS

SEQ ID NO: 43255 - protein, 10 aa, Artificial Sequence
  Description of Artificial Sequence: Synthetic epitope
RVSDGSKVSV

SEQ ID NO: 43256 - protein, 10 aa, Artificial Sequence
  Description of Artificial Sequence: Synthetic epitope
RVSFSAVVFK

SEQ ID NO: 43257 - protein, 10 aa, Artificial Sequence
  Description of Artificial Sequence: Synthetic epitope
RVSGSSGVEV

SEQ ID NO: 43258 - protein, 10 aa, Artificial Sequence
  Description of Artificial Sequence: Synthetic epitope
RVSKQASQPV

SEQ ID NO: 43259 - protein, 10 aa, Artificial Sequence
  Description of Artificial Sequence: Synthetic epitope
RVSKVMILVK

SEQ ID NO: 43260 - protein, 10 aa, Artificial Sequence
  Description of Artificial Sequence: Synthetic epitope
RVSLERVSAL

SEQ ID NO: 43261 - protein, 10 aa, Artificial Sequence
  Description of Artificial Sequence: Synthetic epitope
RVSLLMYAVE

SEQ ID NO: 43262 - protein, 10 aa, Artificial Sequence
  Description of Artificial Sequence: Synthetic epitope
RVSMPYASKG

SEQ ID NO: 43263 - protein, 10 aa, Artificial Sequence
  Description of Artificial Sequence: Synthetic epitope
RVSMVGQVKQ

SEQ ID NO: 43264 - protein, 10 aa, Artificial Sequence
  Description of Artificial Sequence: Synthetic epitope
RVSNQVAVNM

SEQ ID NO: 43265 - protein, 10 aa, Artificial Sequence
  Description of Artificial Sequence: Synthetic epitope
RVSPFETVIS

SEQ ID NO: 43266 - protein, 10 aa, Artificial Sequence
  Description of Artificial Sequence: Synthetic epitope
RVSRNRDAPE

SEQ ID NO: 43267 - protein, 10 aa, Artificial Sequence
  Description of Artificial Sequence: Synthetic epitope
RVSSAQKAAR

SEQ ID NO: 43268 - protein, 10 aa, Artificial Sequence
  Description of Artificial Sequence: Synthetic epitope
RVSSEELDRA

SEQ ID NO: 43269 - protein, 10 aa, Artificial Sequence
  Description of Artificial Sequence: Synthetic epitope
RVSSTLTLTS

SEQ ID NO: 43270 - protein, 10 aa, Artificial Sequence
  Description of Artificial Sequence: Synthetic epitope
RVSVSQTSKL

SEQ ID NO: 43271 - protein, 10 aa, Artificial Sequence
  Description of Artificial Sequence: Synthetic epitope
RVTAEAVKPR

SEQ ID NO: 43272 - protein, 10 aa, Artificial Sequence
  Description of Artificial Sequence: Synthetic epitope
RVTALEQASE

SEQ ID NO: 43273 - protein, 10 aa, Artificial Sequence
  Description of Artificial Sequence: Synthetic epitope
RVTEVKFPLE

SEQ ID NO: 43274 - protein, 10 aa, Artificial Sequence
  Description of Artificial Sequence: Synthetic epitope
RVTFLIYNLF

SEQ ID NO: 43275 - protein, 10 aa, Artificial Sequence
  Description of Artificial Sequence: Synthetic epitope
RVTKEDATAG

SEQ ID NO: 43276 - protein, 10 aa, Artificial Sequence
  Description of Artificial Sequence: Synthetic epitope
RVTKENKMRF

SEQ ID NO: 43277 - protein, 10 aa, Artificial Sequence
  Description of Artificial Sequence: Synthetic epitope
RVTNNVVLEA

SEQ ID NO: 43278 - protein, 10 aa, Artificial Sequence
  Description of Artificial Sequence: Synthetic epitope
RVTRKMLRHA

SEQ ID NO: 43279 - protein, 10 aa, Artificial Sequence
  Description of Artificial Sequence: Synthetic epitope
RVTRSAAPST

SEQ ID NO: 43280 - protein, 10 aa, Artificial Sequence
  Description of Artificial Sequence: Synthetic epitope
RVTSAGLTLQ

SEQ ID NO: 43281 - protein, 10 aa, Artificial Sequence
  Description of Artificial Sequence: Synthetic epitope
RVTSRARSRI

SEQ ID NO: 43282 - protein, 10 aa, Artificial Sequence
  Description of Artificial Sequence: Synthetic epitope
RVTTELNIRE

SEQ ID NO: 43283 - protein, 10 aa, Artificial Sequence
  Description of Artificial Sequence: Synthetic epitope
RVTVSSLPGF

SEQ ID NO: 43284 - protein, 10 aa, Artificial Sequence
  Description of Artificial Sequence: Synthetic epitope
RVVAELSGES

SEQ ID NO: 43285 - protein, 10 aa, Artificial Sequence
  Description of Artificial Sequence: Synthetic epitope
RVVHAAKAAL

SEQ ID NO: 43286 - protein, 10 aa, Artificial Sequence
  Description of Artificial Sequence: Synthetic epitope
RVVHNAEVNF

SEQ ID NO: 43287 - protein, 10 aa, Artificial Sequence
  Description of Artificial Sequence: Synthetic epitope
RVVKRTSSEE

SEQ ID NO: 43288 - protein, 10 aa, Artificial Sequence
  Description of Artificial Sequence: Synthetic epitope
RVVMARLLSE

SEQ ID NO: 43289 - protein, 10 aa, Artificial Sequence
  Description of Artificial Sequence: Synthetic epitope
RVVNQSSIES

SEQ ID NO: 43290 - protein, 10 aa, Artificial Sequence
  Description of Artificial Sequence: Synthetic epitope
RVVPTLSTTD

SEQ ID NO: 43291 - protein, 10 aa, Artificial Sequence
  Description of Artificial Sequence: Synthetic epitope
RVVQKTSSGF

SEQ ID NO: 43292 - protein, 10 aa, Artificial Sequence
  Description of Artificial Sequence: Synthetic epitope
RVVQLPEIVW

SEQ ID NO: 43293 - protein, 10 aa, Artificial Sequence
  Description of Artificial Sequence: Synthetic epitope
RVVRSSPPSS

SEQ ID NO: 43294 - protein, 10 aa, Artificial Sequence
  Description of Artificial Sequence: Synthetic epitope
RVVSNKSSEL

SEQ ID NO: 43295 - protein, 10 aa, Artificial Sequence
  Description of Artificial Sequence: Synthetic epitope
RVVTKAYKEP

SEQ ID NO: 43296 - protein, 10 aa, Artificial Sequence
  Description of Artificial Sequence: Synthetic epitope
RVWAEYALKR

SEQ ID NO: 43297 - protein, 10 aa, Artificial Sequence
  Description of Artificial Sequence: Synthetic epitope
RVWKRGESLR

SEQ ID NO: 43298 - protein, 10 aa, Artificial Sequence
  Description of Artificial Sequence: Synthetic epitope
RVYESDSSNH

SEQ ID NO: 43299 - protein, 10 aa, Artificial Sequence
  Description of Artificial Sequence: Synthetic epitope
RVYLATERRY

SEQ ID NO: 43300 - protein, 10 aa, Artificial Sequence
  Description of Artificial Sequence: Synthetic epitope
RVYQREEVPG

SEQ ID NO: 43301 - protein, 10 aa, Artificial Sequence
  Description of Artificial Sequence: Synthetic epitope
RWAKKTKWMN

SEQ ID NO: 43302 - protein, 10 aa, Artificial Sequence
  Description of Artificial Sequence: Synthetic epitope
RWAVRVLKGV

SEQ ID NO: 43303 - protein, 10 aa, Artificial Sequence
  Description of Artificial Sequence: Synthetic epitope
RWEVMSKVYA

SEQ ID NO: 43304 - protein, 10 aa, Artificial Sequence
  Description of Artificial Sequence: Synthetic epitope
RWFQPVANAA

SEQ ID NO: 43305 - protein, 10 aa, Artificial Sequence
  Description of Artificial Sequence: Synthetic epitope
RWGQASSDRA

SEQ ID NO: 43306 - protein, 10 aa, Artificial Sequence
  Description of Artificial Sequence: Synthetic epitope
RWNLARARAP

SEQ ID NO: 43307 - protein, 10 aa, Artificial Sequence
  Description of Artificial Sequence: Synthetic epitope
RWPSAASVKS

SEQ ID NO: 43308 - protein, 10 aa, Artificial Sequence
  Description of Artificial Sequence: Synthetic epitope
RWQDRSSREN

SEQ ID NO: 43309 - protein, 10 aa, Artificial Sequence
  Description of Artificial Sequence: Synthetic epitope
RWQENQMQIK

SEQ ID NO: 43310 - protein, 10 aa, Artificial Sequence
  Description of Artificial Sequence: Synthetic epitope
RWQFPAHYRR

SEQ ID NO: 43311 - protein, 10 aa, Artificial Sequence
  Description of Artificial Sequence: Synthetic epitope
RWQKSMTNRT

SEQ ID NO: 43312 - protein, 10 aa, Artificial Sequence
  Description of Artificial Sequence: Synthetic epitope
RWRPMTELYA

SEQ ID NO: 43313 - protein, 10 aa, Artificial Sequence
  Description of Artificial Sequence: Synthetic epitope
RWSEAVAEVG

SEQ ID NO: 43314 - protein, 10 aa, Artificial Sequence
  Description of Artificial Sequence: Synthetic epitope
RWSEPFSVDH

SEQ ID NO: 43315 - protein, 10 aa, Artificial Sequence
  Description of Artificial Sequence: Synthetic epitope
RWTQVNQAIA

SEQ ID NO: 43316 - protein, 10 aa, Artificial Sequence
  Description of Artificial Sequence: Synthetic epitope
RWVRSDSTKS

SEQ ID NO: 43317 - protein, 10 aa, Artificial Sequence
  Description of Artificial Sequence: Synthetic epitope
RWVTSKPTFS

SEQ ID NO: 43318 - protein, 10 aa, Artificial Sequence
  Description of Artificial Sequence: Synthetic epitope
RYAAKQFARY

SEQ ID NO: 43319 - protein, 10 aa, Artificial Sequence
  Description of Artificial Sequence: Synthetic epitope
RYALQVKPQR

SEQ ID NO: 43320 - protein, 10 aa, Artificial Sequence
  Description of Artificial Sequence: Synthetic epitope
RYDSSFEAMV

SEQ ID NO: 43321 - protein, 10 aa, Artificial Sequence
  Description of Artificial Sequence: Synthetic epitope
RYEPLEARDL

SEQ ID NO: 43322 - protein, 10 aa, Artificial Sequence
  Description of Artificial Sequence: Synthetic epitope
RYFYKVLMDL

SEQ ID NO: 43323 - protein, 10 aa, Artificial Sequence
  Description of Artificial Sequence: Synthetic epitope
RYGLVMTEAH

SEQ ID NO: 43324 - protein, 10 aa, Artificial Sequence
  Description of Artificial Sequence: Synthetic epitope
RYIERQTFES

SEQ ID NO: 43325 - protein, 10 aa, Artificial Sequence
  Description of Artificial Sequence: Synthetic epitope
RYISDQLFTN

SEQ ID NO: 43326 - protein, 10 aa, Artificial Sequence
  Description of Artificial Sequence: Synthetic epitope
RYISSQIERP

SEQ ID NO: 43327 - protein, 10 aa, Artificial Sequence
  Description of Artificial Sequence: Synthetic epitope
RYKASQRLIS

SEQ ID NO: 43328 - protein, 10 aa, Artificial Sequence
  Description of Artificial Sequence: Synthetic epitope
RYKNEKELQE

SEQ ID NO: 43329 - protein, 10 aa, Artificial Sequence
  Description of Artificial Sequence: Synthetic epitope
RYKQESSESH

SEQ ID NO: 43330 - protein, 10 aa, Artificial Sequence
  Description of Artificial Sequence: Synthetic epitope
RYKSRMNKTY

SEQ ID NO: 43331 - protein, 10 aa, Artificial Sequence
  Description of Artificial Sequence: Synthetic epitope
RYLLGYVSQQ

SEQ ID NO: 43332 - protein, 10 aa, Artificial Sequence
  Description of Artificial Sequence: Synthetic epitope
RYLRAVLANE

SEQ ID NO: 43333 - protein, 10 aa, Artificial Sequence
  Description of Artificial Sequence: Synthetic epitope
RYLVKAFRAH

SEQ ID NO: 43334 - protein, 10 aa, Artificial Sequence
  Description of Artificial Sequence: Synthetic epitope
RYMASRLHSL

SEQ ID NO: 43335 - protein, 10 aa, Artificial Sequence
  Description of Artificial Sequence: Synthetic epitope
RYMKKLENKD

SEQ ID NO: 43336 - protein, 10 aa, Artificial Sequence
  Description of Artificial Sequence: Synthetic epitope
RYNLMVLSQD

SEQ ID NO: 43337 - protein, 10 aa, Artificial Sequence
  Description of Artificial Sequence: Synthetic epitope
RYNQELKAKA

SEQ ID NO: 43338 - protein, 10 aa, Artificial Sequence
  Description of Artificial Sequence: Synthetic epitope
RYPAVSLRLR

SEQ ID NO: 43339 - protein, 10 aa, Artificial Sequence
  Description of Artificial Sequence: Synthetic epitope
RYPHFKTKIE

SEQ ID NO: 43340 - protein, 10 aa, Artificial Sequence
  Description of Artificial Sequence: Synthetic epitope
RYQAQSSTEQ

SEQ ID NO: 43341 - protein, 10 aa, Artificial Sequence
  Description of Artificial Sequence: Synthetic epitope
RYQDKRLLAL

SEQ ID NO: 43342 - protein, 10 aa, Artificial Sequence
  Description of Artificial Sequence: Synthetic epitope
RYQLAVTQRK

SEQ ID NO: 43343 - protein, 10 aa, Artificial Sequence
  Description of Artificial Sequence: Synthetic epitope
RYQLKLFARM

SEQ ID NO: 43344 - protein, 10 aa, Artificial Sequence
  Description of Artificial Sequence: Synthetic epitope
RYRIVKKTPA

SEQ ID NO: 43345 - protein, 10 aa, Artificial Sequence
  Description of Artificial Sequence: Synthetic epitope
RYSERARMKG

SEQ ID NO: 43346 - protein, 10 aa, Artificial Sequence
  Description of Artificial Sequence: Synthetic epitope
RYSGNMEYVI

SEQ ID NO: 43347 - protein, 10 aa, Artificial Sequence
  Description of Artificial Sequence: Synthetic epitope
RYSRRQSKKT

SEQ ID NO: 43348 - protein, 10 aa, Artificial Sequence
  Description of Artificial Sequence: Synthetic epitope
RYSSYRSHDH

SEQ ID NO: 43349 - protein, 10 aa, Artificial Sequence
  Description of Artificial Sequence: Synthetic epitope
RYTAVLARSE

SEQ ID NO: 43350 - protein, 10 aa, Artificial Sequence
  Description of Artificial Sequence: Synthetic epitope
RYTGHHAYAS

SEQ ID NO: 43351 - protein, 10 aa, Artificial Sequence
  Description of Artificial Sequence: Synthetic epitope
RYTKESASSI

SEQ ID NO: 43352 - protein, 10 aa, Artificial Sequence
  Description of Artificial Sequence: Synthetic epitope
RYTPSKENRH

SEQ ID NO: 43353 - protein, 10 aa, Artificial Sequence
  Description of Artificial Sequence: Synthetic epitope
RYVSEVVIGA

SEQ ID NO: 43354 - protein, 10 aa, Artificial Sequence
  Description of Artificial Sequence: Synthetic epitope
RYYMNQVEET

SEQ ID NO: 43355 - protein, 10 aa, Artificial Sequence
  Description of Artificial Sequence: Synthetic epitope
RYYPMAGYIK

SEQ ID NO: 43356 - protein, 10 aa, Artificial Sequence
  Description of Artificial Sequence: Synthetic epitope
RYYQMQRQSD

SEQ ID NO: 43357 - protein, 10 aa, Artificial Sequence
  Description of Artificial Sequence: Synthetic epitope
SAADRLEAAE

SEQ ID NO: 43358 - protein, 10 aa, Artificial Sequence
  Description of Artificial Sequence: Synthetic epitope
SAAEAVRSST

SEQ ID NO: 43359 - protein, 10 aa, Artificial Sequence
  Description of Artificial Sequence: Synthetic epitope
SAAEDKKLKS

SEQ ID NO: 43360 - protein, 10 aa, Artificial Sequence
  Description of Artificial Sequence: Synthetic epitope
SAAEESEPES

SEQ ID NO: 43361 - protein, 10 aa, Artificial Sequence
  Description of Artificial Sequence: Synthetic epitope
SAAEGLISYA

SEQ ID NO: 43362 - protein, 10 aa, Artificial Sequence
  Description of Artificial Sequence: Synthetic epitope
SAAEKKSQEN

SEQ ID NO: 43363 - protein, 10 aa, Artificial Sequence
  Description of Artificial Sequence: Synthetic epitope
SAAERSARGG

SEQ ID NO: 43364 - protein, 10 aa, Artificial Sequence
  Description of Artificial Sequence: Synthetic epitope
SAAESALKNE

SEQ ID NO: 43365 - protein, 10 aa, Artificial Sequence
  Description of Artificial Sequence: Synthetic epitope
SAAEVAATSL

SEQ ID NO: 43366 - protein, 10 aa, Artificial Sequence
  Description of Artificial Sequence: Synthetic epitope
SAAEYHAQRL

SEQ ID NO: 43367 - protein, 10 aa, Artificial Sequence
  Description of Artificial Sequence: Synthetic epitope
SAAFFKVGSQ

SEQ ID NO: 43368 - protein, 10 aa, Artificial Sequence
  Description of Artificial Sequence: Synthetic epitope
SAAGATISAS

SEQ ID NO: 43369 - protein, 10 aa, Artificial Sequence
  Description of Artificial Sequence: Synthetic epitope
SAAGELATVE

SEQ ID NO: 43370 - protein, 10 aa, Artificial Sequence
  Description of Artificial Sequence: Synthetic epitope
SAAHSNDSPP

SEQ ID NO: 43371 - protein, 10 aa, Artificial Sequence
  Description of Artificial Sequence: Synthetic epitope
SAAIAFTLAL

SEQ ID NO: 43372 - protein, 10 aa, Artificial Sequence
  Description of Artificial Sequence: Synthetic epitope
SAAIALLEPA

SEQ ID NO: 43373 - protein, 10 aa, Artificial Sequence
  Description of Artificial Sequence: Synthetic epitope
SAAINFQPKM

SEQ ID NO: 43374 - protein, 10 aa, Artificial Sequence
  Description of Artificial Sequence: Synthetic epitope
SAAKSGTEKK

SEQ ID NO: 43375 - protein, 10 aa, Artificial Sequence
  Description of Artificial Sequence: Synthetic epitope
SAAKSTSTQG

SEQ ID NO: 43376 - protein, 10 aa, Artificial Sequence
  Description of Artificial Sequence: Synthetic epitope
SAAKTGVRFS

SEQ ID NO: 43377 - protein, 10 aa, Artificial Sequence
  Description of Artificial Sequence: Synthetic epitope
SAALAKSGER

SEQ ID NO: 43378 - protein, 10 aa, Artificial Sequence
  Description of Artificial Sequence: Synthetic epitope
SAALASLKGD

SEQ ID NO: 43379 - protein, 10 aa, Artificial Sequence
  Description of Artificial Sequence: Synthetic epitope
SAALASSQKQ

SEQ ID NO: 43380 - protein, 10 aa, Artificial Sequence
  Description of Artificial Sequence: Synthetic epitope
SAALQNANTK

SEQ ID NO: 43381 - protein, 10 aa, Artificial Sequence
  Description of Artificial Sequence: Synthetic epitope
SAALQQSLQN

SEQ ID NO: 43382 - protein, 10 aa, Artificial Sequence
  Description of Artificial Sequence: Synthetic epitope
SAALQSLKRA

SEQ ID NO: 43383 - protein, 10 aa, Artificial Sequence
  Description of Artificial Sequence: Synthetic epitope
SAALQTRPSL

SEQ ID NO: 43384 - protein, 10 aa, Artificial Sequence
  Description of Artificial Sequence: Synthetic epitope
SAAMDEKVIG

SEQ ID NO: 43385 - protein, 10 aa, Artificial Sequence
  Description of Artificial Sequence: Synthetic epitope
SAANAAQRGK

SEQ ID NO: 43386 - protein, 10 aa, Artificial Sequence
  Description of Artificial Sequence: Synthetic epitope
SAAPSETTSP

SEQ ID NO: 43387 - protein, 10 aa, Artificial Sequence
  Description of Artificial Sequence: Synthetic epitope
SAAPSIADTP

SEQ ID NO: 43388 - protein, 10 aa, Artificial Sequence
  Description of Artificial Sequence: Synthetic epitope
SAAPSQLDKP

SEQ ID NO: 43389 - protein, 10 aa, Artificial Sequence
  Description of Artificial Sequence: Synthetic epitope
SAAPSSYTNG

SEQ ID NO: 43390 - protein, 10 aa, Artificial Sequence
  Description of Artificial Sequence: Synthetic epitope
SAAPTAQATE

SEQ ID NO: 43391 - protein, 10 aa, Artificial Sequence
  Description of Artificial Sequence: Synthetic epitope
SAAPTMIKME

SEQ ID NO: 43392 - protein, 10 aa, Artificial Sequence
  Description of Artificial Sequence: Synthetic epitope
SAAQNAFKGN

SEQ ID NO: 43393 - protein, 10 aa, Artificial Sequence
  Description of Artificial Sequence: Synthetic epitope
SAAQSTQPQK

SEQ ID NO: 43394 - protein, 10 aa, Artificial Sequence
  Description of Artificial Sequence: Synthetic epitope
SAARDKDEPT

SEQ ID NO: 43395 - protein, 10 aa, Artificial Sequence
  Description of Artificial Sequence: Synthetic epitope
SAARGINIRV

SEQ ID NO: 43396 - protein, 10 aa, Artificial Sequence
  Description of Artificial Sequence: Synthetic epitope
SAARPNRRAA

SEQ ID NO: 43397 - protein, 10 aa, Artificial Sequence
  Description of Artificial Sequence: Synthetic epitope
SAARSSADSN

SEQ ID NO: 43398 - protein, 10 aa, Artificial Sequence
  Description of Artificial Sequence: Synthetic epitope
SAASAQGTLG

SEQ ID NO: 43399 - protein, 10 aa, Artificial Sequence
  Description of Artificial Sequence: Synthetic epitope
SAASASSEAG

SEQ ID NO: 43400 - protein, 10 aa, Artificial Sequence
  Description of Artificial Sequence: Synthetic epitope
SAASDAVLSA

SEQ ID NO: 43401 - protein, 10 aa, Artificial Sequence
  Description of Artificial Sequence: Synthetic epitope
SAASDQSDSQ

SEQ ID NO: 43402 - protein, 10 aa, Artificial Sequence
  Description of Artificial Sequence: Synthetic epitope
SAASKLSSEK

SEQ ID NO: 43403 - protein, 10 aa, Artificial Sequence
  Description of Artificial Sequence: Synthetic epitope
SAASKRARTA

SEQ ID NO: 43404 - protein, 10 aa, Artificial Sequence
  Description of Artificial Sequence: Synthetic epitope
SAASLEMGNR

SEQ ID NO: 43405 - protein, 10 aa, Artificial Sequence
  Description of Artificial Sequence: Synthetic epitope
SAASNSINWN

SEQ ID NO: 43406 - protein, 10 aa, Artificial Sequence
  Description of Artificial Sequence: Synthetic epitope
SAASPSQAYE

SEQ ID NO: 43407 - protein, 10 aa, Artificial Sequence
  Description of Artificial Sequence: Synthetic epitope
SAASSDNTEN

SEQ ID NO: 43408 - protein, 10 aa, Artificial Sequence
  Description of Artificial Sequence: Synthetic epitope
SAASSEAAQN

SEQ ID NO: 43409 - protein, 10 aa, Artificial Sequence
  Description of Artificial Sequence: Synthetic epitope
SAASSRRTSL

SEQ ID NO: 43410 - protein, 10 aa, Artificial Sequence
  Description of Artificial Sequence: Synthetic epitope
SAASTAGKEG

SEQ ID NO: 43411 - protein, 10 aa, Artificial Sequence
  Description of Artificial Sequence: Synthetic epitope
SAASTEAERL

SEQ ID NO: 43412 - protein, 10 aa, Artificial Sequence
  Description of Artificial Sequence: Synthetic epitope
SAASTTSSPV

SEQ ID NO: 43413 - protein, 10 aa, Artificial Sequence
  Description of Artificial Sequence: Synthetic epitope
SAATAASKKF

SEQ ID NO: 43414 - protein, 10 aa, Artificial Sequence
  Description of Artificial Sequence: Synthetic epitope
SAATARSPQP

SEQ ID NO: 43415 - protein, 10 aa, Artificial Sequence
  Description of Artificial Sequence: Synthetic epitope
SAATEHDRSW

SEQ ID NO: 43416 - protein, 10 aa, Artificial Sequence
  Description of Artificial Sequence: Synthetic epitope
SAATLSYTTS

SEQ ID NO: 43417 - protein, 10 aa, Artificial Sequence
  Description of Artificial Sequence: Synthetic epitope
SAATPMTQIP

SEQ ID NO: 43418 - protein, 10 aa, Artificial Sequence
  Description of Artificial Sequence: Synthetic epitope
SAATSDAVGS

SEQ ID NO: 43419 - protein, 10 aa, Artificial Sequence
  Description of Artificial Sequence: Synthetic epitope
SAATYLMDKV

SEQ ID NO: 43420 - protein, 10 aa, Artificial Sequence
  Description of Artificial Sequence: Synthetic epitope
SAAVADSLTN

SEQ ID NO: 43421 - protein, 10 aa, Artificial Sequence
  Description of Artificial Sequence: Synthetic epitope
SAAVDANASE

SEQ ID NO: 43422 - protein, 10 aa, Artificial Sequence
  Description of Artificial Sequence: Synthetic epitope
SAAVEKGAGA

SEQ ID NO: 43423 - protein, 10 aa, Artificial Sequence
  Description of Artificial Sequence: Synthetic epitope
SAAVEQIKTS

SEQ ID NO: 43424 - protein, 10 aa, Artificial Sequence
  Description of Artificial Sequence: Synthetic epitope
SAAVTALNSE

SEQ ID NO: 43425 - protein, 10 aa, Artificial Sequence
  Description of Artificial Sequence: Synthetic epitope
SAAWASRRSS

SEQ ID NO: 43426 - protein, 10 aa, Artificial Sequence
  Description of Artificial Sequence: Synthetic epitope
SADANMEKAT

SEQ ID NO: 43427 - protein, 10 aa, Artificial Sequence
  Description of Artificial Sequence: Synthetic epitope
SADARVRTIK

SEQ ID NO: 43428 - protein, 10 aa, Artificial Sequence
  Description of Artificial Sequence: Synthetic epitope
SADDIAGKFQ

SEQ ID NO: 43429 - protein, 10 aa, Artificial Sequence
  Description of Artificial Sequence: Synthetic epitope
SADETSTASS

SEQ ID NO: 43430 - protein, 10 aa, Artificial Sequence
  Description of Artificial Sequence: Synthetic epitope
SADGAVTSSL

SEQ ID NO: 43431 - protein, 10 aa, Artificial Sequence
  Description of Artificial Sequence: Synthetic epitope
SADHIKSQDS

SEQ ID NO: 43432 - protein, 10 aa, Artificial Sequence
  Description of Artificial Sequence: Synthetic epitope
SADLTTAQTP

SEQ ID NO: 43433 - protein, 10 aa, Artificial Sequence
  Description of Artificial Sequence: Synthetic epitope
SADLVIVLKR

SEQ ID NO: 43434 - protein, 10 aa, Artificial Sequence
  Description of Artificial Sequence: Synthetic epitope
SADMIPKRLT

SEQ ID NO: 43435 - protein, 10 aa, Artificial Sequence
  Description of Artificial Sequence: Synthetic epitope
SADNLKSSLL

SEQ ID NO: 43436 - protein, 10 aa, Artificial Sequence
  Description of Artificial Sequence: Synthetic epitope
SADPLKSKHQ

SEQ ID NO: 43437 - protein, 10 aa, Artificial Sequence
  Description of Artificial Sequence: Synthetic epitope
SADQMLTSYP

SEQ ID NO: 43438 - protein, 10 aa, Artificial Sequence
  Description of Artificial Sequence: Synthetic epitope
SADRRSSVDR

SEQ ID NO: 43439 - protein, 10 aa, Artificial Sequence
  Description of Artificial Sequence: Synthetic epitope
SADSLAASDE

SEQ ID NO: 43440 - protein, 10 aa, Artificial Sequence
  Description of Artificial Sequence: Synthetic epitope
SADSQKSSVQ

SEQ ID NO: 43441 - protein, 10 aa, Artificial Sequence
  Description of Artificial Sequence: Synthetic epitope
SADVAADIAK

SEQ ID NO: 43442 - protein, 10 aa, Artificial Sequence
  Description of Artificial Sequence: Synthetic epitope
SADVATINST

SEQ ID NO: 43443 - protein, 10 aa, Artificial Sequence
  Description of Artificial Sequence: Synthetic epitope
SADVQQARYV

SEQ ID NO: 43444 - protein, 10 aa, Artificial Sequence
  Description of Artificial Sequence: Synthetic epitope
SADYEEQKNS

SEQ ID NO: 43445 - protein, 10 aa, Artificial Sequence
  Description of Artificial Sequence: Synthetic epitope
SADYTRAQEL

SEQ ID NO: 43446 - protein, 10 aa, Artificial Sequence
  Description of Artificial Sequence: Synthetic epitope
SADYTRAQEL

SEQ ID NO: 43447 - protein, 10 aa, Artificial Sequence
  Description of Artificial Sequence: Synthetic epitope
SAEAGTGGLE

SEQ ID NO: 43448 - protein, 10 aa, Artificial Sequence
  Description of Artificial Sequence: Synthetic epitope
SAEAIALEQS

SEQ ID NO: 43449 - protein, 10 aa, Artificial Sequence
  Description of Artificial Sequence: Synthetic epitope
SAEARVVLSR

SEQ ID NO: 43450 - protein, 10 aa, Artificial Sequence
  Description of Artificial Sequence: Synthetic epitope
SAEEAALRRA

SEQ ID NO: 43451 - protein, 10 aa, Artificial Sequence
  Description of Artificial Sequence: Synthetic epitope
SAEEAASVLA

SEQ ID NO: 43452 - protein, 10 aa, Artificial Sequence
  Description of Artificial Sequence: Synthetic epitope
SAEEAHAEVQ

SEQ ID NO: 43453 - protein, 10 aa, Artificial Sequence
  Description of Artificial Sequence: Synthetic epitope
SAEEGGAAPA

SEQ ID NO: 43454 - protein, 10 aa, Artificial Sequence
  Description of Artificial Sequence: Synthetic epitope
SAEEGRLLAE

SEQ ID NO: 43455 - protein, 10 aa, Artificial Sequence
  Description of Artificial Sequence: Synthetic epitope
SAEEKEKDKS

SEQ ID NO: 43456 - protein, 10 aa, Artificial Sequence
  Description of Artificial Sequence: Synthetic epitope
SAEESSTSRK

SEQ ID NO: 43457 - protein, 10 aa, Artificial Sequence
  Description of Artificial Sequence: Synthetic epitope
SAEGKVRNKL

SEQ ID NO: 43458 - protein, 10 aa, Artificial Sequence
  Description of Artificial Sequence: Synthetic epitope
SAEHFSQDLK

SEQ ID NO: 43459 - protein, 10 aa, Artificial Sequence
  Description of Artificial Sequence: Synthetic epitope
SAEHKTTYEG

SEQ ID NO: 43460 - protein, 10 aa, Artificial Sequence
  Description of Artificial Sequence: Synthetic epitope
SAEIATTPEA

SEQ ID NO: 43461 - protein, 10 aa, Artificial Sequence
  Description of Artificial Sequence: Synthetic epitope
SAEIKQIVSE

SEQ ID NO: 43462 - protein, 10 aa, Artificial Sequence
  Description of Artificial Sequence: Synthetic epitope
SAEIMDYQSR

SEQ ID NO: 43463 - protein, 10 aa, Artificial Sequence
  Description of Artificial Sequence: Synthetic epitope
SAEKAARQMR

SEQ ID NO: 43464 - protein, 10 aa, Artificial Sequence
  Description of Artificial Sequence: Synthetic epitope
SAEKDKDKRE

SEQ ID NO: 43465 - protein, 10 aa, Artificial Sequence
  Description of Artificial Sequence: Synthetic epitope
SAEKGRLDRT

SEQ ID NO: 43466 - protein, 10 aa, Artificial Sequence
  Description of Artificial Sequence: Synthetic epitope
SAELALNVIT

SEQ ID NO: 43467 - protein, 10 aa, Artificial Sequence
  Description of Artificial Sequence: Synthetic epitope
SAELDRSRPA

SEQ ID NO: 43468 - protein, 10 aa, Artificial Sequence
  Description of Artificial Sequence: Synthetic epitope
SAENNQLSGA

SEQ ID NO: 43469 - protein, 10 aa, Artificial Sequence
  Description of Artificial Sequence: Synthetic epitope
SAENTYESTN

SEQ ID NO: 43470 - protein, 10 aa, Artificial Sequence
  Description of Artificial Sequence: Synthetic epitope
SAEPFLYSSD

SEQ ID NO: 43471 - protein, 10 aa, Artificial Sequence
  Description of Artificial Sequence: Synthetic epitope
SAEQLSSPMP

SEQ ID NO: 43472 - protein, 10 aa, Artificial Sequence
  Description of Artificial Sequence: Synthetic epitope
SAEQVDDPPE

SEQ ID NO: 43473 - protein, 10 aa, Artificial Sequence
  Description of Artificial Sequence: Synthetic epitope
SAEREAAQGF

SEQ ID NO: 43474 - protein, 10 aa, Artificial Sequence
  Description of Artificial Sequence: Synthetic epitope
SAEREAAQGF

SEQ ID NO: 43475 - protein, 10 aa, Artificial Sequence
  Description of Artificial Sequence: Synthetic epitope
SAERYISSIT

SEQ ID NO: 43476 - protein, 10 aa, Artificial Sequence
  Description of Artificial Sequence: Synthetic epitope
SAESEAEMAE

SEQ ID NO: 43477 - protein, 10 aa, Artificial Sequence
  Description of Artificial Sequence: Synthetic epitope
SAESERSYKK

SEQ ID NO: 43478 - protein, 10 aa, Artificial Sequence
  Description of Artificial Sequence: Synthetic epitope
SAESLSVLVK

SEQ ID NO: 43479 - protein, 10 aa, Artificial Sequence
  Description of Artificial Sequence: Synthetic epitope
SAESQTSEMD

SEQ ID NO: 43480 - protein, 10 aa, Artificial Sequence
  Description of Artificial Sequence: Synthetic epitope
SAESSDSEGF

SEQ ID NO: 43481 - protein, 10 aa, Artificial Sequence
  Description of Artificial Sequence: Synthetic epitope
SAETKETERQ

SEQ ID NO: 43482 - protein, 10 aa, Artificial Sequence
  Description of Artificial Sequence: Synthetic epitope
SAETLQEHET

SEQ ID NO: 43483 - protein, 10 aa, Artificial Sequence
  Description of Artificial Sequence: Synthetic epitope
SAETLSSTAL

SEQ ID NO: 43484 - protein, 10 aa, Artificial Sequence
  Description of Artificial Sequence: Synthetic epitope
SAETRKFTRA

SEQ ID NO: 43485 - protein, 10 aa, Artificial Sequence
  Description of Artificial Sequence: Synthetic epitope
SAEVSLSQTS

SEQ ID NO: 43486 - protein, 10 aa, Artificial Sequence
  Description of Artificial Sequence: Synthetic epitope
SAEYGTNAKE

SEQ ID NO: 43487 - protein, 10 aa, Artificial Sequence
  Description of Artificial Sequence: Synthetic epitope
SAFDKKAQAD

SEQ ID NO: 43488 - protein, 10 aa, Artificial Sequence
  Description of Artificial Sequence: Synthetic epitope
SAFDSKLQHS

SEQ ID NO: 43489 - protein, 10 aa, Artificial Sequence
  Description of Artificial Sequence: Synthetic epitope
SAFKFKKSSK

SEQ ID NO: 43490 - protein, 10 aa, Artificial Sequence
  Description of Artificial Sequence: Synthetic epitope
SAFNTSVELP

SEQ ID NO: 43491 - protein, 10 aa, Artificial Sequence
  Description of Artificial Sequence: Synthetic epitope
SAFPTAKQDD

SEQ ID NO: 43492 - protein, 10 aa, Artificial Sequence
  Description of Artificial Sequence: Synthetic epitope
SAFSEKLSSD

SEQ ID NO: 43493 - protein, 10 aa, Artificial Sequence
  Description of Artificial Sequence: Synthetic epitope
SAFSTSISKQ

SEQ ID NO: 43494 - protein, 10 aa, Artificial Sequence
  Description of Artificial Sequence: Synthetic epitope
SAGAAQKKPA

SEQ ID NO: 43495 - protein, 10 aa, Artificial Sequence
  Description of Artificial Sequence: Synthetic epitope
SAGAERTLAS

SEQ ID NO: 43496 - protein, 10 aa, Artificial Sequence
  Description of Artificial Sequence: Synthetic epitope
SAGARRKNSR

SEQ ID NO: 43497 - protein, 10 aa, Artificial Sequence
  Description of Artificial Sequence: Synthetic epitope
SAGDQSGSPT

SEQ ID NO: 43498 - protein, 10 aa, Artificial Sequence
  Description of Artificial Sequence: Synthetic epitope
SAGELSIQPS

SEQ ID NO: 43499 - protein, 10 aa, Artificial Sequence
  Description of Artificial Sequence: Synthetic epitope
SAGESISLDE

SEQ ID NO: 43500 - protein, 10 aa, Artificial Sequence
  Description of Artificial Sequence: Synthetic epitope
SAGIMDHEEA

SEQ ID NO: 43501 - protein, 10 aa, Artificial Sequence
  Description of Artificial Sequence: Synthetic epitope
SAGIQRAQIQ

SEQ ID NO: 43502 - protein, 10 aa, Artificial Sequence
  Description of Artificial Sequence: Synthetic epitope
SAGIQSRRKK

SEQ ID NO: 43503 - protein, 10 aa, Artificial Sequence
  Description of Artificial Sequence: Synthetic epitope
SAGITGADAN

SEQ ID NO: 43504 - protein, 10 aa, Artificial Sequence
  Description of Artificial Sequence: Synthetic epitope
SAGKGSATSN

SEQ ID NO: 43505 - protein, 10 aa, Artificial Sequence
  Description of Artificial Sequence: Synthetic epitope
SAGKKASSAA

SEQ ID NO: 43506 - protein, 10 aa, Artificial Sequence
  Description of Artificial Sequence: Synthetic epitope
SAGMAASPEM

SEQ ID NO: 43507 - protein, 10 aa, Artificial Sequence
  Description of Artificial Sequence: Synthetic epitope
SAGNNANSTG

SEQ ID NO: 43508 - protein, 10 aa, Artificial Sequence
  Description of Artificial Sequence: Synthetic epitope
SAGRRDAARP

SEQ ID NO: 43509 - protein, 10 aa, Artificial Sequence
  Description of Artificial Sequence: Synthetic epitope
SAGSNNSAEG

SEQ ID NO: 43510 - protein, 10 aa, Artificial Sequence
  Description of Artificial Sequence: Synthetic epitope
SAGSPAISES

SEQ ID NO: 43511 - protein, 10 aa, Artificial Sequence
  Description of Artificial Sequence: Synthetic epitope
SAGSQAKDKE

SEQ ID NO: 43512 - protein, 10 aa, Artificial Sequence
  Description of Artificial Sequence: Synthetic epitope
SAGSTQTLAQ

SEQ ID NO: 43513 - protein, 10 aa, Artificial Sequence
  Description of Artificial Sequence: Synthetic epitope
SAGTAEKRKG

SEQ ID NO: 43514 - protein, 10 aa, Artificial Sequence
  Description of Artificial Sequence: Synthetic epitope
SAGVDDPHQH

SEQ ID NO: 43515 - protein, 10 aa, Artificial Sequence
  Description of Artificial Sequence: Synthetic epitope
SAGVKSKASL

SEQ ID NO: 43516 - protein, 10 aa, Artificial Sequence
  Description of Artificial Sequence: Synthetic epitope
SAGVSVLDNE

SEQ ID NO: 43517 - protein, 10 aa, Artificial Sequence
  Description of Artificial Sequence: Synthetic epitope
SAGVTATTGQ

SEQ ID NO: 43518 - protein, 10 aa, Artificial Sequence
  Description of Artificial Sequence: Synthetic epitope
SAHEKGLKTR

SEQ ID NO: 43519 - protein, 10 aa, Artificial Sequence
  Description of Artificial Sequence: Synthetic epitope
SAHHRSQESL

SEQ ID NO: 43520 - protein, 10 aa, Artificial Sequence
  Description of Artificial Sequence: Synthetic epitope
SAHKENTKTQ

SEQ ID NO: 43521 - protein, 10 aa, Artificial Sequence
  Description of Artificial Sequence: Synthetic epitope
SAHSLQPSSG

SEQ ID NO: 43522 - protein, 10 aa, Artificial Sequence
  Description of Artificial Sequence: Synthetic epitope
SAHSQYNIQN

SEQ ID NO: 43523 - protein, 10 aa, Artificial Sequence
  Description of Artificial Sequence: Synthetic epitope
SAIDSVDKVP

SEQ ID NO: 43524 - protein, 10 aa, Artificial Sequence
  Description of Artificial Sequence: Synthetic epitope
SAIEGEANKY

SEQ ID NO: 43525 - protein, 10 aa, Artificial Sequence
  Description of Artificial Sequence: Synthetic epitope
SAIEGLSSTR

SEQ ID NO: 43526 - protein, 10 aa, Artificial Sequence
  Description of Artificial Sequence: Synthetic epitope
SAIFQASAPR

SEQ ID NO: 43527 - protein, 10 aa, Artificial Sequence
  Description of Artificial Sequence: Synthetic epitope
SAIIDLIKTQ

SEQ ID NO: 43528 - protein, 10 aa, Artificial Sequence
  Description of Artificial Sequence: Synthetic epitope
SAIIRKAASD

SEQ ID NO: 43529 - protein, 10 aa, Artificial Sequence
  Description of Artificial Sequence: Synthetic epitope
SAIIYDRDFS

SEQ ID NO: 43530 - protein, 10 aa, Artificial Sequence
  Description of Artificial Sequence: Synthetic epitope
SAIKELKLQT

SEQ ID NO: 43531 - protein, 10 aa, Artificial Sequence
  Description of Artificial Sequence: Synthetic epitope
SAIKRKEKDH

SEQ ID NO: 43532 - protein, 10 aa, Artificial Sequence
  Description of Artificial Sequence: Synthetic epitope
SAILKLIKND

SEQ ID NO: 43533 - protein, 10 aa, Artificial Sequence
  Description of Artificial Sequence: Synthetic epitope
SAIPVTTIAQ

SEQ ID NO: 43534 - protein, 10 aa, Artificial Sequence
  Description of Artificial Sequence: Synthetic epitope
SAIQSKVLGL

SEQ ID NO: 43535 - protein, 10 aa, Artificial Sequence
  Description of Artificial Sequence: Synthetic epitope
SAIRAVAKNT

SEQ ID NO: 43536 - protein, 10 aa, Artificial Sequence
  Description of Artificial Sequence: Synthetic epitope
SAISGQLQSY

SEQ ID NO: 43537 - protein, 10 aa, Artificial Sequence
  Description of Artificial Sequence: Synthetic epitope
SAISKALETL

SEQ ID NO: 43538 - protein, 10 aa, Artificial Sequence
  Description of Artificial Sequence: Synthetic epitope
SAISKAVSGA

SEQ ID NO: 43539 - protein, 10 aa, Artificial Sequence
  Description of Artificial Sequence: Synthetic epitope
SAISNKEASS

SEQ ID NO: 43540 - protein, 10 aa, Artificial Sequence
  Description of Artificial Sequence: Synthetic epitope
SAISQSKQDE

SEQ ID NO: 43541 - protein, 10 aa, Artificial Sequence
  Description of Artificial Sequence: Synthetic epitope
SAISSPLTKS

SEQ ID NO: 43542 - protein, 10 aa, Artificial Sequence
  Description of Artificial Sequence: Synthetic epitope
SAITAFSASA

SEQ ID NO: 43543 - protein, 10 aa, Artificial Sequence
  Description of Artificial Sequence: Synthetic epitope
SAITTANIRP

SEQ ID NO: 43544 - protein, 10 aa, Artificial Sequence
  Description of Artificial Sequence: Synthetic epitope
SAIVSSVQSK

SEQ ID NO: 43545 - protein, 10 aa, Artificial Sequence
  Description of Artificial Sequence: Synthetic epitope
SAIWQQAREV

SEQ ID NO: 43546 - protein, 10 aa, Artificial Sequence
  Description of Artificial Sequence: Synthetic epitope
SAKADAKVMK

SEQ ID NO: 43547 - protein, 10 aa, Artificial Sequence
  Description of Artificial Sequence: Synthetic epitope
SAKALSVKQL

SEQ ID NO: 43548 - protein, 10 aa, Artificial Sequence
  Description of Artificial Sequence: Synthetic epitope
SAKAPVRSVV

SEQ ID NO: 43549 - protein, 10 aa, Artificial Sequence
  Description of Artificial Sequence: Synthetic epitope
SAKATQPSSA

SEQ ID NO: 43550 - protein, 10 aa, Artificial Sequence
  Description of Artificial Sequence: Synthetic epitope
SAKDFEVAMQ

SEQ ID NO: 43551 - protein, 10 aa, Artificial Sequence
  Description of Artificial Sequence: Synthetic epitope
SAKDKRLSTM

SEQ ID NO: 43552 - protein, 10 aa, Artificial Sequence
  Description of Artificial Sequence: Synthetic epitope
SAKDLKEKKE

SEQ ID NO: 43553 - protein, 10 aa, Artificial Sequence
  Description of Artificial Sequence: Synthetic epitope
SAKDLTRTVQ

SEQ ID NO: 43554 - protein, 10 aa, Artificial Sequence
  Description of Artificial Sequence: Synthetic epitope
SAKDRLAQSD

SEQ ID NO: 43555 - protein, 10 aa, Artificial Sequence
  Description of Artificial Sequence: Synthetic epitope
SAKEAGEAAK

SEQ ID NO: 43556 - protein, 10 aa, Artificial Sequence
  Description of Artificial Sequence: Synthetic epitope
SAKEISNNDK

SEQ ID NO: 43557 - protein, 10 aa, Artificial Sequence
  Description of Artificial Sequence: Synthetic epitope
SAKGIVESSV

SEQ ID NO: 43558 - protein, 10 aa, Artificial Sequence
  Description of Artificial Sequence: Synthetic epitope
SAKGLAATHH

SEQ ID NO: 43559 - protein, 10 aa, Artificial Sequence
  Description of Artificial Sequence: Synthetic epitope
SAKGREELLR

SEQ ID NO: 43560 - protein, 10 aa, Artificial Sequence
  Description of Artificial Sequence: Synthetic epitope
SAKGVSIEEA

SEQ ID NO: 43561 - protein, 10 aa, Artificial Sequence
  Description of Artificial Sequence: Synthetic epitope
SAKHQSEMED

SEQ ID NO: 43562 - protein, 10 aa, Artificial Sequence
  Description of Artificial Sequence: Synthetic epitope
SAKHSARLSS

SEQ ID NO: 43563 - protein, 10 aa, Artificial Sequence
  Description of Artificial Sequence: Synthetic epitope
SAKHSARLSS

SEQ ID NO: 43564 - protein, 10 aa, Artificial Sequence
  Description of Artificial Sequence: Synthetic epitope
SAKIKPKQQK

SEQ ID NO: 43565 - protein, 10 aa, Artificial Sequence
  Description of Artificial Sequence: Synthetic epitope
SAKILTQVSK

SEQ ID NO: 43566 - protein, 10 aa, Artificial Sequence
  Description of Artificial Sequence: Synthetic epitope
SAKIRAIEKS

SEQ ID NO: 43567 - protein, 10 aa, Artificial Sequence
  Description of Artificial Sequence: Synthetic epitope
SAKKASALSD

SEQ ID NO: 43568 - protein, 10 aa, Artificial Sequence
  Description of Artificial Sequence: Synthetic epitope
SAKKGKGEKD

SEQ ID NO: 43569 - protein, 10 aa, Artificial Sequence
  Description of Artificial Sequence: Synthetic epitope
SAKKPLRASS

SEQ ID NO: 43570 - protein, 10 aa, Artificial Sequence
  Description of Artificial Sequence: Synthetic epitope
SAKLEGNETL

SEQ ID NO: 43571 - protein, 10 aa, Artificial Sequence
  Description of Artificial Sequence: Synthetic epitope
SAKLLVKAGA

SEQ ID NO: 43572 - protein, 10 aa, Artificial Sequence
  Description of Artificial Sequence: Synthetic epitope
SAKLPALASV

SEQ ID NO: 43573 - protein, 10 aa, Artificial Sequence
  Description of Artificial Sequence: Synthetic epitope
SAKLSLIQFF

SEQ ID NO: 43574 - protein, 10 aa, Artificial Sequence
  Description of Artificial Sequence: Synthetic epitope
SAKMLSSEPK

SEQ ID NO: 43575 - protein, 10 aa, Artificial Sequence
  Description of Artificial Sequence: Synthetic epitope
SAKMTEVMMN

SEQ ID NO: 43576 - protein, 10 aa, Artificial Sequence
  Description of Artificial Sequence: Synthetic epitope
SAKRETSGEK

SEQ ID NO: 43577 - protein, 10 aa, Artificial Sequence
  Description of Artificial Sequence: Synthetic epitope
SAKSAEMPTI

SEQ ID NO: 43578 - protein, 10 aa, Artificial Sequence
  Description of Artificial Sequence: Synthetic epitope
SAKSASVPDE

SEQ ID NO: 43579 - protein, 10 aa, Artificial Sequence
  Description of Artificial Sequence: Synthetic epitope
SAKSSRSQLD

SEQ ID NO: 43580 - protein, 10 aa, Artificial Sequence
  Description of Artificial Sequence: Synthetic epitope
SAKSSTEPSL

SEQ ID NO: 43581 - protein, 10 aa, Artificial Sequence
  Description of Artificial Sequence: Synthetic epitope
SAKSVEQYYG

SEQ ID NO: 43582 - protein, 10 aa, Artificial Sequence
  Description of Artificial Sequence: Synthetic epitope
SAKTGSFGVT

SEQ ID NO: 43583 - protein, 10 aa, Artificial Sequence
  Description of Artificial Sequence: Synthetic epitope
SAKTHHQAVN

SEQ ID NO: 43584 - protein, 10 aa, Artificial Sequence
  Description of Artificial Sequence: Synthetic epitope
SAKTLSNKKS

SEQ ID NO: 43585 - protein, 10 aa, Artificial Sequence
  Description of Artificial Sequence: Synthetic epitope
SAKTSSVSNP

SEQ ID NO: 43586 - protein, 10 aa, Artificial Sequence
  Description of Artificial Sequence: Synthetic epitope
SAKVEALEPE

SEQ ID NO: 43587 - protein, 10 aa, Artificial Sequence
  Description of Artificial Sequence: Synthetic epitope
SAKVEVVEER

SEQ ID NO: 43588 - protein, 10 aa, Artificial Sequence
  Description of Artificial Sequence: Synthetic epitope
SAKVLSSLVA

SEQ ID NO: 43589 - protein, 10 aa, Artificial Sequence
  Description of Artificial Sequence: Synthetic epitope
SAKVSGATRH

SEQ ID NO: 43590 - protein, 10 aa, Artificial Sequence
  Description of Artificial Sequence: Synthetic epitope
SAKYSAPSAS

SEQ ID NO: 43591 - protein, 10 aa, Artificial Sequence
  Description of Artificial Sequence: Synthetic epitope
SALADADADL

SEQ ID NO: 43592 - protein, 10 aa, Artificial Sequence
  Description of Artificial Sequence: Synthetic epitope
SALALENENQ

SEQ ID NO: 43593 - protein, 10 aa, Artificial Sequence
  Description of Artificial Sequence: Synthetic epitope
SALEGSSASA

SEQ ID NO: 43594 - protein, 10 aa, Artificial Sequence
  Description of Artificial Sequence: Synthetic epitope
SALESLLTSP

SEQ ID NO: 43595 - protein, 10 aa, Artificial Sequence
  Description of Artificial Sequence: Synthetic epitope
SALEVAKFEG

SEQ ID NO: 43596 - protein, 10 aa, Artificial Sequence
  Description of Artificial Sequence: Synthetic epitope
SALFSTELSV

SEQ ID NO: 43597 - protein, 10 aa, Artificial Sequence
  Description of Artificial Sequence: Synthetic epitope
SALGQQPSIS

SEQ ID NO: 43598 - protein, 10 aa, Artificial Sequence
  Description of Artificial Sequence: Synthetic epitope
SALGRLAIRL

SEQ ID NO: 43599 - protein, 10 aa, Artificial Sequence
  Description of Artificial Sequence: Synthetic epitope
SALHTSALST

SEQ ID NO: 43600 - protein, 10 aa, Artificial Sequence
  Description of Artificial Sequence: Synthetic epitope
SALHTSSDDS

SEQ ID NO: 43601 - protein, 10 aa, Artificial Sequence
  Description of Artificial Sequence: Synthetic epitope
SALIKAELAE

SEQ ID NO: 43602 - protein, 10 aa, Artificial Sequence
  Description of Artificial Sequence: Synthetic epitope
SALIKISQNK

SEQ ID NO: 43603 - protein, 10 aa, Artificial Sequence
  Description of Artificial Sequence: Synthetic epitope
SALKQALLRK

SEQ ID NO: 43604 - protein, 10 aa, Artificial Sequence
  Description of Artificial Sequence: Synthetic epitope
SALKSAMAHD

SEQ ID NO: 43605 - protein, 10 aa, Artificial Sequence
  Description of Artificial Sequence: Synthetic epitope
SALKVSQAEK

SEQ ID NO: 43606 - protein, 10 aa, Artificial Sequence
  Description of Artificial Sequence: Synthetic epitope
SALKVSQAEK

SEQ ID NO: 43607 - protein, 10 aa, Artificial Sequence
  Description of Artificial Sequence: Synthetic epitope
SALLAGLGAR

SEQ ID NO: 43608 - protein, 10 aa, Artificial Sequence
  Description of Artificial Sequence: Synthetic epitope
SALLALLARR

SEQ ID NO: 43609 - protein, 10 aa, Artificial Sequence
  Description of Artificial Sequence: Synthetic epitope
SALLQESQVE

SEQ ID NO: 43610 - protein, 10 aa, Artificial Sequence
  Description of Artificial Sequence: Synthetic epitope
SALLSLEQAL

SEQ ID NO: 43611 - protein, 10 aa, Artificial Sequence
  Description of Artificial Sequence: Synthetic epitope
SALMDMEEDI

SEQ ID NO: 43612 - protein, 10 aa, Artificial Sequence
  Description of Artificial Sequence: Synthetic epitope
SALMLTMEDL

SEQ ID NO: 43613 - protein, 10 aa, Artificial Sequence
  Description of Artificial Sequence: Synthetic epitope
SALNKKQEAE

SEQ ID NO: 43614 - protein, 10 aa, Artificial Sequence
  Description of Artificial Sequence: Synthetic epitope
SALNTKIRAL

SEQ ID NO: 43615 - protein, 10 aa, Artificial Sequence
  Description of Artificial Sequence: Synthetic epitope
SALPRTATLA

SEQ ID NO: 43616 - protein, 10 aa, Artificial Sequence
  Description of Artificial Sequence: Synthetic epitope
SALQQALGSV

SEQ ID NO: 43617 - protein, 10 aa, Artificial Sequence
  Description of Artificial Sequence: Synthetic epitope
SALQQETEKS

SEQ ID NO: 43618 - protein, 10 aa, Artificial Sequence
  Description of Artificial Sequence: Synthetic epitope
SALQSELSAE

SEQ ID NO: 43619 - protein, 10 aa, Artificial Sequence
  Description of Artificial Sequence: Synthetic epitope
SALQSLVKEL

SEQ ID NO: 43620 - protein, 10 aa, Artificial Sequence
  Description of Artificial Sequence: Synthetic epitope
SALQSLVKEL

SEQ ID NO: 43621 - protein, 10 aa, Artificial Sequence
  Description of Artificial Sequence: Synthetic epitope
SALRALLQTM

SEQ ID NO: 43622 - protein, 10 aa, Artificial Sequence
  Description of Artificial Sequence: Synthetic epitope
SALRGSQSVS

SEQ ID NO: 43623 - protein, 10 aa, Artificial Sequence
  Description of Artificial Sequence: Synthetic epitope
SALRREASTL

SEQ ID NO: 43624 - protein, 10 aa, Artificial Sequence
  Description of Artificial Sequence: Synthetic epitope
SALRTASPQQ

SEQ ID NO: 43625 - protein, 10 aa, Artificial Sequence
  Description of Artificial Sequence: Synthetic epitope
SALSAQAAPS

SEQ ID NO: 43626 - protein, 10 aa, Artificial Sequence
  Description of Artificial Sequence: Synthetic epitope
SALSEQTEAL

SEQ ID NO: 43627 - protein, 10 aa, Artificial Sequence
  Description of Artificial Sequence: Synthetic epitope
SALSETSRFD

SEQ ID NO: 43628 - protein, 10 aa, Artificial Sequence
  Description of Artificial Sequence: Synthetic epitope
SALSKVLWNV

SEQ ID NO: 43629 - protein, 10 aa, Artificial Sequence
  Description of Artificial Sequence: Synthetic epitope
SALSQLSFEV

SEQ ID NO: 43630 - protein, 10 aa, Artificial Sequence
  Description of Artificial Sequence: Synthetic epitope
SALSVETPSY

SEQ ID NO: 43631 - protein, 10 aa, Artificial Sequence
  Description of Artificial Sequence: Synthetic epitope
SALTEATSQQ

SEQ ID NO: 43632 - protein, 10 aa, Artificial Sequence
  Description of Artificial Sequence: Synthetic epitope
SALTEEVESE

SEQ ID NO: 43633 - protein, 10 aa, Artificial Sequence
  Description of Artificial Sequence: Synthetic epitope
SALTKPKNNH

SEQ ID NO: 43634 - protein, 10 aa, Artificial Sequence
  Description of Artificial Sequence: Synthetic epitope
SALTRALRAE

SEQ ID NO: 43635 - protein, 10 aa, Artificial Sequence
  Description of Artificial Sequence: Synthetic epitope
SALTSTPAAS

SEQ ID NO: 43636 - protein, 10 aa, Artificial Sequence
  Description of Artificial Sequence: Synthetic epitope
SALVKSASAA

SEQ ID NO: 43637 - protein, 10 aa, Artificial Sequence
  Description of Artificial Sequence: Synthetic epitope
SALVSKEDEE

SEQ ID NO: 43638 - protein, 10 aa, Artificial Sequence
  Description of Artificial Sequence: Synthetic epitope
SALVSVRSSL

SEQ ID NO: 43639 - protein, 10 aa, Artificial Sequence
  Description of Artificial Sequence: Synthetic epitope
SALVTNSDLS

SEQ ID NO: 43640 - protein, 10 aa, Artificial Sequence
  Description of Artificial Sequence: Synthetic epitope
SAMAVQVPLW

SEQ ID NO: 43641 - protein, 10 aa, Artificial Sequence
  Description of Artificial Sequence: Synthetic epitope
SAMESFIEKQ

SEQ ID NO: 43642 - protein, 10 aa, Artificial Sequence
  Description of Artificial Sequence: Synthetic epitope
SAMKLLPNMA

SEQ ID NO: 43643 - protein, 10 aa, Artificial Sequence
  Description of Artificial Sequence: Synthetic epitope
SAMLSQSLDL

SEQ ID NO: 43644 - protein, 10 aa, Artificial Sequence
  Description of Artificial Sequence: Synthetic epitope
SAMNVTRREQ

SEQ ID NO: 43645 - protein, 10 aa, Artificial Sequence
  Description of Artificial Sequence: Synthetic epitope
SAMRVLLSKL

SEQ ID NO: 43646 - protein, 10 aa, Artificial Sequence
  Description of Artificial Sequence: Synthetic epitope
SAMSIMTEIG

SEQ ID NO: 43647 - protein, 10 aa, Artificial Sequence
  Description of Artificial Sequence: Synthetic epitope
SAMSKSTVST

SEQ ID NO: 43648 - protein, 10 aa, Artificial Sequence
  Description of Artificial Sequence: Synthetic epitope
SAMSTTAKGS

SEQ ID NO: 43649 - protein, 10 aa, Artificial Sequence
  Description of Artificial Sequence: Synthetic epitope
SANANRPTQI

SEQ ID NO: 43650 - protein, 10 aa, Artificial Sequence
  Description of Artificial Sequence: Synthetic epitope
SANEKADSAG

SEQ ID NO: 43651 - protein, 10 aa, Artificial Sequence
  Description of Artificial Sequence: Synthetic epitope
SANFPEFSFD

SEQ ID NO: 43652 - protein, 10 aa, Artificial Sequence
  Description of Artificial Sequence: Synthetic epitope
SANIEFQMAL

SEQ ID NO: 43653 - protein, 10 aa, Artificial Sequence
  Description of Artificial Sequence: Synthetic epitope
SANKIAGPRK

SEQ ID NO: 43654 - protein, 10 aa, Artificial Sequence
  Description of Artificial Sequence: Synthetic epitope
SANKPKPPTM

SEQ ID NO: 43655 - protein, 10 aa, Artificial Sequence
  Description of Artificial Sequence: Synthetic epitope
SANLATSHLP

SEQ ID NO: 43656 - protein, 10 aa, Artificial Sequence
  Description of Artificial Sequence: Synthetic epitope
SANMPAVLQA

SEQ ID NO: 43657 - protein, 10 aa, Artificial Sequence
  Description of Artificial Sequence: Synthetic epitope
SANSPVNMPT

SEQ ID NO: 43658 - protein, 10 aa, Artificial Sequence
  Description of Artificial Sequence: Synthetic epitope
SANSQPSATT

SEQ ID NO: 43659 - protein, 10 aa, Artificial Sequence
  Description of Artificial Sequence: Synthetic epitope
SANSRSLSQI

SEQ ID NO: 43660 - protein, 10 aa, Artificial Sequence
  Description of Artificial Sequence: Synthetic epitope
SANSSEGQDQ

SEQ ID NO: 43661 - protein, 10 aa, Artificial Sequence
  Description of Artificial Sequence: Synthetic epitope
SANTFELKYD

SEQ ID NO: 43662 - protein, 10 aa, Artificial Sequence
  Description of Artificial Sequence: Synthetic epitope
SANTLNSETS

SEQ ID NO: 43663 - protein, 10 aa, Artificial Sequence
  Description of Artificial Sequence: Synthetic epitope
SANVLPIVQI

SEQ ID NO: 43664 - protein, 10 aa, Artificial Sequence
  Description of Artificial Sequence: Synthetic epitope
SAPAKLIGHG

SEQ ID NO: 43665 - protein, 10 aa, Artificial Sequence
  Description of Artificial Sequence: Synthetic epitope
SAPALLSAQT

SEQ ID NO: 43666 - protein, 10 aa, Artificial Sequence
  Description of Artificial Sequence: Synthetic epitope
SAPEAEQGGA

SEQ ID NO: 43667 - protein, 10 aa, Artificial Sequence
  Description of Artificial Sequence: Synthetic epitope
SAPELELDQA

SEQ ID NO: 43668 - protein, 10 aa, Artificial Sequence
  Description of Artificial Sequence: Synthetic epitope
SAPELESKES

SEQ ID NO: 43669 - protein, 10 aa, Artificial Sequence
  Description of Artificial Sequence: Synthetic epitope
SAPELSVVSA

SEQ ID NO: 43670 - protein, 10 aa, Artificial Sequence
  Description of Artificial Sequence: Synthetic epitope
SAPENAVRMD

SEQ ID NO: 43671 - protein, 10 aa, Artificial Sequence
  Description of Artificial Sequence: Synthetic epitope
SAPIRRLEWQ

SEQ ID NO: 43672 - protein, 10 aa, Artificial Sequence
  Description of Artificial Sequence: Synthetic epitope
SAPKAAQAQE

SEQ ID NO: 43673 - protein, 10 aa, Artificial Sequence
  Description of Artificial Sequence: Synthetic epitope
SAPKTDMDNQ

SEQ ID NO: 43674 - protein, 10 aa, Artificial Sequence
  Description of Artificial Sequence: Synthetic epitope
SAPLNKANRK

SEQ ID NO: 43675 - protein, 10 aa, Artificial Sequence
  Description of Artificial Sequence: Synthetic epitope
SAPRNKSHID

SEQ ID NO: 43676 - protein, 10 aa, Artificial Sequence
  Description of Artificial Sequence: Synthetic epitope
SAPSASTAAV

SEQ ID NO: 43677 - protein, 10 aa, Artificial Sequence
  Description of Artificial Sequence: Synthetic epitope
SAPSRANENV

SEQ ID NO: 43678 - protein, 10 aa, Artificial Sequence
  Description of Artificial Sequence: Synthetic epitope
SAPTRSDSFM

SEQ ID NO: 43679 - protein, 10 aa, Artificial Sequence
  Description of Artificial Sequence: Synthetic epitope
SAPVATGLST

SEQ ID NO: 43680 - protein, 10 aa, Artificial Sequence
  Description of Artificial Sequence: Synthetic epitope
SAPVHEIHES

SEQ ID NO: 43681 - protein, 10 aa, Artificial Sequence
  Description of Artificial Sequence: Synthetic epitope
SAPVSQKMHR

SEQ ID NO: 43682 - protein, 10 aa, Artificial Sequence
  Description of Artificial Sequence: Synthetic epitope
SAPVSSAEPK

SEQ ID NO: 43683 - protein, 10 aa, Artificial Sequence
  Description of Artificial Sequence: Synthetic epitope
SAQAASSQSA

SEQ ID NO: 43684 - protein, 10 aa, Artificial Sequence
  Description of Artificial Sequence: Synthetic epitope
SAQANTSKAQ

SEQ ID NO: 43685 - protein, 10 aa, Artificial Sequence
  Description of Artificial Sequence: Synthetic epitope
SAQASAEQQE

SEQ ID NO: 43686 - protein, 10 aa, Artificial Sequence
  Description of Artificial Sequence: Synthetic epitope
SAQASSATSG

SEQ ID NO: 43687 - protein, 10 aa, Artificial Sequence
  Description of Artificial Sequence: Synthetic epitope
SAQEAEELAA

SEQ ID NO: 43688 - protein, 10 aa, Artificial Sequence
  Description of Artificial Sequence: Synthetic epitope
SAQEAGSAER

SEQ ID NO: 43689 - protein, 10 aa, Artificial Sequence
  Description of Artificial Sequence: Synthetic epitope
SAQEAQKDTD

SEQ ID NO: 43690 - protein, 10 aa, Artificial Sequence
  Description of Artificial Sequence: Synthetic epitope
SAQELAEQDA

SEQ ID NO: 43691 - protein, 10 aa, Artificial Sequence
  Description of Artificial Sequence: Synthetic epitope
SAQELKEQGN

SEQ ID NO: 43692 - protein, 10 aa, Artificial Sequence
  Description of Artificial Sequence: Synthetic epitope
SAQERAQIAQ

SEQ ID NO: 43693 - protein, 10 aa, Artificial Sequence
  Description of Artificial Sequence: Synthetic epitope
SAQESASSHP

SEQ ID NO: 43694 - protein, 10 aa, Artificial Sequence
  Description of Artificial Sequence: Synthetic epitope
SAQGNETKSN

SEQ ID NO: 43695 - protein, 10 aa, Artificial Sequence
  Description of Artificial Sequence: Synthetic epitope
SAQGSKPKNF

SEQ ID NO: 43696 - protein, 10 aa, Artificial Sequence
  Description of Artificial Sequence: Synthetic epitope
SAQKALKIMQ

SEQ ID NO: 43697 - protein, 10 aa, Artificial Sequence
  Description of Artificial Sequence: Synthetic epitope
SAQLISESQR

SEQ ID NO: 43698 - protein, 10 aa, Artificial Sequence
  Description of Artificial Sequence: Synthetic epitope
SAQLISTNAL

SEQ ID NO: 43699 - protein, 10 aa, Artificial Sequence
  Description of Artificial Sequence: Synthetic epitope
SAQNGESSPS

SEQ ID NO: 43700 - protein, 10 aa, Artificial Sequence
  Description of Artificial Sequence: Synthetic epitope
SAQQASKSKQ

SEQ ID NO: 43701 - protein, 10 aa, Artificial Sequence
  Description of Artificial Sequence: Synthetic epitope
SAQQMSQIVS

SEQ ID NO: 43702 - protein, 10 aa, Artificial Sequence
  Description of Artificial Sequence: Synthetic epitope
SAQSAQSRPS

SEQ ID NO: 43703 - protein, 10 aa, Artificial Sequence
  Description of Artificial Sequence: Synthetic epitope
SAQSAQYSQQ

SEQ ID NO: 43704 - protein, 10 aa, Artificial Sequence
  Description of Artificial Sequence: Synthetic epitope
SAQSAVDGRT

SEQ ID NO: 43705 - protein, 10 aa, Artificial Sequence
  Description of Artificial Sequence: Synthetic epitope
SAQSISFKWE

SEQ ID NO: 43706 - protein, 10 aa, Artificial Sequence
  Description of Artificial Sequence: Synthetic epitope
SAQTAPTTDS

SEQ ID NO: 43707 - protein, 10 aa, Artificial Sequence
  Description of Artificial Sequence: Synthetic epitope
SAQVKPIVSA

SEQ ID NO: 43708 - protein, 10 aa, Artificial Sequence
  Description of Artificial Sequence: Synthetic epitope
SAQVSPAVDS

SEQ ID NO: 43709 - protein, 10 aa, Artificial Sequence
  Description of Artificial Sequence: Synthetic epitope
SAQVSPAVDS

SEQ ID NO: 43710 - protein, 10 aa, Artificial Sequence
  Description of Artificial Sequence: Synthetic epitope
SAQVSPAVDS

SEQ ID NO: 43711 - protein, 10 aa, Artificial Sequence
  Description of Artificial Sequence: Synthetic epitope
SARARREARE

SEQ ID NO: 43712 - protein, 10 aa, Artificial Sequence
  Description of Artificial Sequence: Synthetic epitope
SARDKKTEAA

SEQ ID NO: 43713 - protein, 10 aa, Artificial Sequence
  Description of Artificial Sequence: Synthetic epitope
SARDQAEDPA

SEQ ID NO: 43714 - protein, 10 aa, Artificial Sequence
  Description of Artificial Sequence: Synthetic epitope
SARDSEQVAE

SEQ ID NO: 43715 - protein, 10 aa, Artificial Sequence
  Description of Artificial Sequence: Synthetic epitope
SARDVMAAYG

SEQ ID NO: 43716 - protein, 10 aa, Artificial Sequence
  Description of Artificial Sequence: Synthetic epitope
SAREKLSAFV

SEQ ID NO: 43717 - protein, 10 aa, Artificial Sequence
  Description of Artificial Sequence: Synthetic epitope
SARKTQTPAA

SEQ ID NO: 43718 - protein, 10 aa, Artificial Sequence
  Description of Artificial Sequence: Synthetic epitope
SARMAPALSG

SEQ ID NO: 43719 - protein, 10 aa, Artificial Sequence
  Description of Artificial Sequence: Synthetic epitope
SARPTAQVLP

SEQ ID NO: 43720 - protein, 10 aa, Artificial Sequence
  Description of Artificial Sequence: Synthetic epitope
SARRLSKVTK

SEQ ID NO: 43721 - protein, 10 aa, Artificial Sequence
  Description of Artificial Sequence: Synthetic epitope
SARRNSTTFP

SEQ ID NO: 43722 - protein, 10 aa, Artificial Sequence
  Description of Artificial Sequence: Synthetic epitope
SARRSKRNRK

SEQ ID NO: 43723 - protein, 10 aa, Artificial Sequence
  Description of Artificial Sequence: Synthetic epitope
SARSERDTSD

SEQ ID NO: 43724 - protein, 10 aa, Artificial Sequence
  Description of Artificial Sequence: Synthetic epitope
SARSGKKQKK

SEQ ID NO: 43725 - protein, 10 aa, Artificial Sequence
  Description of Artificial Sequence: Synthetic epitope
SARSQANSIQ

SEQ ID NO: 43726 - protein, 10 aa, Artificial Sequence
  Description of Artificial Sequence: Synthetic epitope
SARSSAQNGS

SEQ ID NO: 43727 - protein, 10 aa, Artificial Sequence
  Description of Artificial Sequence: Synthetic epitope
SASAAEVAPR

SEQ ID NO: 43728 - protein, 10 aa, Artificial Sequence
  Description of Artificial Sequence: Synthetic epitope
SASAASTPSG

SEQ ID NO: 43729 - protein, 10 aa, Artificial Sequence
  Description of Artificial Sequence: Synthetic epitope
SASAKSIDSK

SEQ ID NO: 43730 - protein, 10 aa, Artificial Sequence
  Description of Artificial Sequence: Synthetic epitope
SASAPGISQI

SEQ ID NO: 43731 - protein, 10 aa, Artificial Sequence
  Description of Artificial Sequence: Synthetic epitope
SASAPQEKLS

SEQ ID NO: 43732 - protein, 10 aa, Artificial Sequence
  Description of Artificial Sequence: Synthetic epitope
SASAQQLAEE

SEQ ID NO: 43733 - protein, 10 aa, Artificial Sequence
  Description of Artificial Sequence: Synthetic epitope
SASASLLVRN

SEQ ID NO: 43734 - protein, 10 aa, Artificial Sequence
  Description of Artificial Sequence: Synthetic epitope
SASASSEKGD

SEQ ID NO: 43735 - protein, 10 aa, Artificial Sequence
  Description of Artificial Sequence: Synthetic epitope
SASAVRSYDG

SEQ ID NO: 43736 - protein, 10 aa, Artificial Sequence
  Description of Artificial Sequence: Synthetic epitope
SASDELDDSQ

SEQ ID NO: 43737 - protein, 10 aa, Artificial Sequence
  Description of Artificial Sequence: Synthetic epitope
SASDKLPRVA

SEQ ID NO: 43738 - protein, 10 aa, Artificial Sequence
  Description of Artificial Sequence: Synthetic epitope
SASEFQELDS

SEQ ID NO: 43739 - protein, 10 aa, Artificial Sequence
  Description of Artificial Sequence: Synthetic epitope
SASEGAQSSL

SEQ ID NO: 43740 - protein, 10 aa, Artificial Sequence
  Description of Artificial Sequence: Synthetic epitope
SASEIAVIRD

SEQ ID NO: 43741 - protein, 10 aa, Artificial Sequence
  Description of Artificial Sequence: Synthetic epitope
SASEKKRKRK

SEQ ID NO: 43742 - protein, 10 aa, Artificial Sequence
  Description of Artificial Sequence: Synthetic epitope
SASELKELDK

SEQ ID NO: 43743 - protein, 10 aa, Artificial Sequence
  Description of Artificial Sequence: Synthetic epitope
SASEMVVEKH

SEQ ID NO: 43744 - protein, 10 aa, Artificial Sequence
  Description of Artificial Sequence: Synthetic epitope
SASENLDELS

SEQ ID NO: 43745 - protein, 10 aa, Artificial Sequence
  Description of Artificial Sequence: Synthetic epitope
SASESIAEDL

SEQ ID NO: 43746 - protein, 10 aa, Artificial Sequence
  Description of Artificial Sequence: Synthetic epitope
SASESKLSEM

SEQ ID NO: 43747 - protein, 10 aa, Artificial Sequence
  Description of Artificial Sequence: Synthetic epitope
SASEVSASAI

SEQ ID NO: 43748 - protein, 10 aa, Artificial Sequence
  Description of Artificial Sequence: Synthetic epitope
SASGAESSFT

SEQ ID NO: 43749 - protein, 10 aa, Artificial Sequence
  Description of Artificial Sequence: Synthetic epitope
SASGAESSFT

SEQ ID NO: 43750 - protein, 10 aa, Artificial Sequence
  Description of Artificial Sequence: Synthetic epitope
SASGETVERK

SEQ ID NO: 43751 - protein, 10 aa, Artificial Sequence
  Description of Artificial Sequence: Synthetic epitope
SASGRKIFSN

SEQ ID NO: 43752 - protein, 10 aa, Artificial Sequence
  Description of Artificial Sequence: Synthetic epitope
SASITSTSAA

SEQ ID NO: 43753 - protein, 10 aa, Artificial Sequence
  Description of Artificial Sequence: Synthetic epitope
SASKEKSKKP

SEQ ID NO: 43754 - protein, 10 aa, Artificial Sequence
  Description of Artificial Sequence: Synthetic epitope
SASKESLSTH

SEQ ID NO: 43755 - protein, 10 aa, Artificial Sequence
  Description of Artificial Sequence: Synthetic epitope
SASKLRIAQV

SEQ ID NO: 43756 - protein, 10 aa, Artificial Sequence
  Description of Artificial Sequence: Synthetic epitope
SASKLSRQKN

SEQ ID NO: 43757 - protein, 10 aa, Artificial Sequence
  Description of Artificial Sequence: Synthetic epitope
SASKPSADQI

SEQ ID NO: 43758 - protein, 10 aa, Artificial Sequence
  Description of Artificial Sequence: Synthetic epitope
SASKVYKASD

SEQ ID NO: 43759 - protein, 10 aa, Artificial Sequence
  Description of Artificial Sequence: Synthetic epitope
SASLATPITT

SEQ ID NO: 43760 - protein, 10 aa, Artificial Sequence
  Description of Artificial Sequence: Synthetic epitope
SASLNDGSKT

SEQ ID NO: 43761 - protein, 10 aa, Artificial Sequence
  Description of Artificial Sequence: Synthetic epitope
SASLQGIDSQ

SEQ ID NO: 43762 - protein, 10 aa, Artificial Sequence
  Description of Artificial Sequence: Synthetic epitope
SASLSQLESQ

SEQ ID NO: 43763 - protein, 10 aa, Artificial Sequence
  Description of Artificial Sequence: Synthetic epitope
SASLSTPLSN

SEQ ID NO: 43764 - protein, 10 aa, Artificial Sequence
  Description of Artificial Sequence: Synthetic epitope
SASNDSLLEE

SEQ ID NO: 43765 - protein, 10 aa, Artificial Sequence
  Description of Artificial Sequence: Synthetic epitope
SASPESASPQ

SEQ ID NO: 43766 - protein, 10 aa, Artificial Sequence
  Description of Artificial Sequence: Synthetic epitope
SASPSAVTAA

SEQ ID NO: 43767 - protein, 10 aa, Artificial Sequence
  Description of Artificial Sequence: Synthetic epitope
SASQERSLDE

SEQ ID NO: 43768 - protein, 10 aa, Artificial Sequence
  Description of Artificial Sequence: Synthetic epitope
SASQQASPQT

SEQ ID NO: 43769 - protein, 10 aa, Artificial Sequence
  Description of Artificial Sequence: Synthetic epitope
SASQSSVKKA

SEQ ID NO: 43770 - protein, 10 aa, Artificial Sequence
  Description of Artificial Sequence: Synthetic epitope
SASRAKSAEA

SEQ ID NO: 43771 - protein, 10 aa, Artificial Sequence
  Description of Artificial Sequence: Synthetic epitope
SASRANLSLR

SEQ ID NO: 43772 - protein, 10 aa, Artificial Sequence
  Description of Artificial Sequence: Synthetic epitope
SASRRFNSQS

SEQ ID NO: 43773 - protein, 10 aa, Artificial Sequence
  Description of Artificial Sequence: Synthetic epitope
SASSAKNPHA

SEQ ID NO: 43774 - protein, 10 aa, Artificial Sequence
  Description of Artificial Sequence: Synthetic epitope
SASSASALGG

SEQ ID NO: 43775 - protein, 10 aa, Artificial Sequence
  Description of Artificial Sequence: Synthetic epitope
SASSDTQTSL

SEQ ID NO: 43776 - protein, 10 aa, Artificial Sequence
  Description of Artificial Sequence: Synthetic epitope
SASSESKKLL

SEQ ID NO: 43777 - protein, 10 aa, Artificial Sequence
  Description of Artificial Sequence: Synthetic epitope
SASSKALFPS

SEQ ID NO: 43778 - protein, 10 aa, Artificial Sequence
  Description of Artificial Sequence: Synthetic epitope
SASSLRTQPN

SEQ ID NO: 43779 - protein, 10 aa, Artificial Sequence
  Description of Artificial Sequence: Synthetic epitope
SASSLSKHYL

SEQ ID NO: 43780 - protein, 10 aa, Artificial Sequence
  Description of Artificial Sequence: Synthetic epitope
SASSLVNLDS

SEQ ID NO: 43781 - protein, 10 aa, Artificial Sequence
  Description of Artificial Sequence: Synthetic epitope
SASSQLRASR

SEQ ID NO: 43782 - protein, 10 aa, Artificial Sequence
  Description of Artificial Sequence: Synthetic epitope
SASSQSHTFI

SEQ ID NO: 43783 - protein, 10 aa, Artificial Sequence
  Description of Artificial Sequence: Synthetic epitope
SASSTLGSPE

SEQ ID NO: 43784 - protein, 10 aa, Artificial Sequence
  Description of Artificial Sequence: Synthetic epitope
SASTAALAVF

SEQ ID NO: 43785 - protein, 10 aa, Artificial Sequence
  Description of Artificial Sequence: Synthetic epitope
SASTKYASAE

SEQ ID NO: 43786 - protein, 10 aa, Artificial Sequence
  Description of Artificial Sequence: Synthetic epitope
SASTSHNRRV

SEQ ID NO: 43787 - protein, 10 aa, Artificial Sequence
  Description of Artificial Sequence: Synthetic epitope
SASTSKRLEA

SEQ ID NO: 43788 - protein, 10 aa, Artificial Sequence
  Description of Artificial Sequence: Synthetic epitope
SASTSQSTRA

SEQ ID NO: 43789 - protein, 10 aa, Artificial Sequence
  Description of Artificial Sequence: Synthetic epitope
SASTSTLTAE

SEQ ID NO: 43790 - protein, 10 aa, Artificial Sequence
  Description of Artificial Sequence: Synthetic epitope
SASVAEVQEQ

SEQ ID NO: 43791 - protein, 10 aa, Artificial Sequence
  Description of Artificial Sequence: Synthetic epitope
SASVAQLEAR

SEQ ID NO: 43792 - protein, 10 aa, Artificial Sequence
  Description of Artificial Sequence: Synthetic epitope
SASVQVASAT

SEQ ID NO: 43793 - protein, 10 aa, Artificial Sequence
  Description of Artificial Sequence: Synthetic epitope
SASVTEGQQN

SEQ ID NO: 43794 - protein, 10 aa, Artificial Sequence
  Description of Artificial Sequence: Synthetic epitope
SASVVKVNSQ

SEQ ID NO: 43795 - protein, 10 aa, Artificial Sequence
  Description of Artificial Sequence: Synthetic epitope
SATAKAVDGY

SEQ ID NO: 43796 - protein, 10 aa, Artificial Sequence
  Description of Artificial Sequence: Synthetic epitope
SATALRSRMI

SEQ ID NO: 43797 - protein, 10 aa, Artificial Sequence
  Description of Artificial Sequence: Synthetic epitope
SATASRSSGG

SEQ ID NO: 43798 - protein, 10 aa, Artificial Sequence
  Description of Artificial Sequence: Synthetic epitope
SATDSQLQSS

SEQ ID NO: 43799 - protein, 10 aa, Artificial Sequence
  Description of Artificial Sequence: Synthetic epitope
SATESLTLLS

SEQ ID NO: 43800 - protein, 10 aa, Artificial Sequence
  Description of Artificial Sequence: Synthetic epitope
SATESVSFSG

SEQ ID NO: 43801 - protein, 10 aa, Artificial Sequence
  Description of Artificial Sequence: Synthetic epitope
SATFKMLESS

SEQ ID NO: 43802 - protein, 10 aa, Artificial Sequence
  Description of Artificial Sequence: Synthetic epitope
SATGKAVVEE

SEQ ID NO: 43803 - protein, 10 aa, Artificial Sequence
  Description of Artificial Sequence: Synthetic epitope
SATIAQIEHR

SEQ ID NO: 43804 - protein, 10 aa, Artificial Sequence
  Description of Artificial Sequence: Synthetic epitope
SATIPKATKP

SEQ ID NO: 43805 - protein, 10 aa, Artificial Sequence
  Description of Artificial Sequence: Synthetic epitope
SATKELAIEV

SEQ ID NO: 43806 - protein, 10 aa, Artificial Sequence
  Description of Artificial Sequence: Synthetic epitope
SATKGLSASL

SEQ ID NO: 43807 - protein, 10 aa, Artificial Sequence
  Description of Artificial Sequence: Synthetic epitope
SATLNSKTTS

SEQ ID NO: 43808 - protein, 10 aa, Artificial Sequence
  Description of Artificial Sequence: Synthetic epitope
SATLSFDSRE

SEQ ID NO: 43809 - protein, 10 aa, Artificial Sequence
  Description of Artificial Sequence: Synthetic epitope
SATLVVIIPH

SEQ ID NO: 43810 - protein, 10 aa, Artificial Sequence
  Description of Artificial Sequence: Synthetic epitope
SATMNLFSEH

SEQ ID NO: 43811 - protein, 10 aa, Artificial Sequence
  Description of Artificial Sequence: Synthetic epitope
SATMSPVERT

SEQ ID NO: 43812 - protein, 10 aa, Artificial Sequence
  Description of Artificial Sequence: Synthetic epitope
SATNTTVNNG

SEQ ID NO: 43813 - protein, 10 aa, Artificial Sequence
  Description of Artificial Sequence: Synthetic epitope
SATPTKKTVP

SEQ ID NO: 43814 - protein, 10 aa, Artificial Sequence
  Description of Artificial Sequence: Synthetic epitope
SATQFHIETH

SEQ ID NO: 43815 - protein, 10 aa, Artificial Sequence
  Description of Artificial Sequence: Synthetic epitope
SATQKKLSKI

SEQ ID NO: 43816 - protein, 10 aa, Artificial Sequence
  Description of Artificial Sequence: Synthetic epitope
SATQLFSESV

SEQ ID NO: 43817 - protein, 10 aa, Artificial Sequence
  Description of Artificial Sequence: Synthetic epitope
SATQTFNSGA

SEQ ID NO: 43818 - protein, 10 aa, Artificial Sequence
  Description of Artificial Sequence: Synthetic epitope
SATRAALASE

SEQ ID NO: 43819 - protein, 10 aa, Artificial Sequence
  Description of Artificial Sequence: Synthetic epitope
SATRRESLST

SEQ ID NO: 43820 - protein, 10 aa, Artificial Sequence
  Description of Artificial Sequence: Synthetic epitope
SATRSKKRQH

SEQ ID NO: 43821 - protein, 10 aa, Artificial Sequence
  Description of Artificial Sequence: Synthetic epitope
SATRVGNTVP

SEQ ID NO: 43822 - protein, 10 aa, Artificial Sequence
  Description of Artificial Sequence: Synthetic epitope
SATSELVTAS

SEQ ID NO: 43823 - protein, 10 aa, Artificial Sequence
  Description of Artificial Sequence: Synthetic epitope
SATSGAEKAT

SEQ ID NO: 43824 - protein, 10 aa, Artificial Sequence
  Description of Artificial Sequence: Synthetic epitope
SATSKLGEAP

SEQ ID NO: 43825 - protein, 10 aa, Artificial Sequence
  Description of Artificial Sequence: Synthetic epitope
SATSKLIHPD

SEQ ID NO: 43826 - protein, 10 aa, Artificial Sequence
  Description of Artificial Sequence: Synthetic epitope
SATSNSSNGG

SEQ ID NO: 43827 - protein, 10 aa, Artificial Sequence
  Description of Artificial Sequence: Synthetic epitope
SATSSIQKTE

SEQ ID NO: 43828 - protein, 10 aa, Artificial Sequence
  Description of Artificial Sequence: Synthetic epitope
SATSTSASPT

SEQ ID NO: 43829 - protein, 10 aa, Artificial Sequence
  Description of Artificial Sequence: Synthetic epitope
SATSTVTDIL

SEQ ID NO: 43830 - protein, 10 aa, Artificial Sequence
  Description of Artificial Sequence: Synthetic epitope
SATSVATKKT

SEQ ID NO: 43831 - protein, 10 aa, Artificial Sequence
  Description of Artificial Sequence: Synthetic epitope
SATTQQENSY

SEQ ID NO: 43832 - protein, 10 aa, Artificial Sequence
  Description of Artificial Sequence: Synthetic epitope
SATTQSSKQL

SEQ ID NO: 43833 - protein, 10 aa, Artificial Sequence
  Description of Artificial Sequence: Synthetic epitope
SATVAAKGHP

SEQ ID NO: 43834 - protein, 10 aa, Artificial Sequence
  Description of Artificial Sequence: Synthetic epitope
SATVQKDELR

SEQ ID NO: 43835 - protein, 10 aa, Artificial Sequence
  Description of Artificial Sequence: Synthetic epitope
SATVSNSASV

SEQ ID NO: 43836 - protein, 10 aa, Artificial Sequence
  Description of Artificial Sequence: Synthetic epitope
SAVAIALAHK

SEQ ID NO: 43837 - protein, 10 aa, Artificial Sequence
  Description of Artificial Sequence: Synthetic epitope
SAVANRSKKS

SEQ ID NO: 43838 - protein, 10 aa, Artificial Sequence
  Description of Artificial Sequence: Synthetic epitope
SAVDMTQREA

SEQ ID NO: 43839 - protein, 10 aa, Artificial Sequence
  Description of Artificial Sequence: Synthetic epitope
SAVDSQEIDK

SEQ ID NO: 43840 - protein, 10 aa, Artificial Sequence
  Description of Artificial Sequence: Synthetic epitope
SAVEQAPIDM

SEQ ID NO: 43841 - protein, 10 aa, Artificial Sequence
  Description of Artificial Sequence: Synthetic epitope
SAVESEATHQ

SEQ ID NO: 43842 - protein, 10 aa, Artificial Sequence
  Description of Artificial Sequence: Synthetic epitope
SAVFAMKSAS

SEQ ID NO: 43843 - protein, 10 aa, Artificial Sequence
  Description of Artificial Sequence: Synthetic epitope
SAVGRMAGVK

SEQ ID NO: 43844 - protein, 10 aa, Artificial Sequence
  Description of Artificial Sequence: Synthetic epitope
SAVGTIVKKA

SEQ ID NO: 43845 - protein, 10 aa, Artificial Sequence
  Description of Artificial Sequence: Synthetic epitope
SAVIDFKQRV

SEQ ID NO: 43846 - protein, 10 aa, Artificial Sequence
  Description of Artificial Sequence: Synthetic epitope
SAVIRVVEGG

SEQ ID NO: 43847 - protein, 10 aa, Artificial Sequence
  Description of Artificial Sequence: Synthetic epitope
SAVKAEKESA

SEQ ID NO: 43848 - protein, 10 aa, Artificial Sequence
  Description of Artificial Sequence: Synthetic epitope
SAVKIDLEKS

SEQ ID NO: 43849 - protein, 10 aa, Artificial Sequence
  Description of Artificial Sequence: Synthetic epitope
SAVKVNLSEK

SEQ ID NO: 43850 - protein, 10 aa, Artificial Sequence
  Description of Artificial Sequence: Synthetic epitope
SAVKVQLAEF

SEQ ID NO: 43851 - protein, 10 aa, Artificial Sequence
  Description of Artificial Sequence: Synthetic epitope
SAVLEAGKNL

SEQ ID NO: 43852 - protein, 10 aa, Artificial Sequence
  Description of Artificial Sequence: Synthetic epitope
SAVLPSVLNK

SEQ ID NO: 43853 - protein, 10 aa, Artificial Sequence
  Description of Artificial Sequence: Synthetic epitope
SAVLQAIQVE

SEQ ID NO: 43854 - protein, 10 aa, Artificial Sequence
  Description of Artificial Sequence: Synthetic epitope
SAVLSRIQKI

SEQ ID NO: 43855 - protein, 10 aa, Artificial Sequence
  Description of Artificial Sequence: Synthetic epitope
SAVLYYLDQT

SEQ ID NO: 43856 - protein, 10 aa, Artificial Sequence
  Description of Artificial Sequence: Synthetic epitope
SAVMQEVPLA

SEQ ID NO: 43857 - protein, 10 aa, Artificial Sequence
  Description of Artificial Sequence: Synthetic epitope
SAVNKINNID

SEQ ID NO: 43858 - protein, 10 aa, Artificial Sequence
  Description of Artificial Sequence: Synthetic epitope
SAVPSQSSIH

SEQ ID NO: 43859 - protein, 10 aa, Artificial Sequence
  Description of Artificial Sequence: Synthetic epitope
SAVQKEGSGG

SEQ ID NO: 43860 - protein, 10 aa, Artificial Sequence
  Description of Artificial Sequence: Synthetic epitope
SAVRIPLFQE

SEQ ID NO: 43861 - protein, 10 aa, Artificial Sequence
  Description of Artificial Sequence: Synthetic epitope
SAVRSIYKAS

SEQ ID NO: 43862 - protein, 10 aa, Artificial Sequence
  Description of Artificial Sequence: Synthetic epitope
SAVSEASFSY

SEQ ID NO: 43863 - protein, 10 aa, Artificial Sequence
  Description of Artificial Sequence: Synthetic epitope
SAVSLYQIQE

SEQ ID NO: 43864 - protein, 10 aa, Artificial Sequence
  Description of Artificial Sequence: Synthetic epitope
SAVSSQTLSQ

SEQ ID NO: 43865 - protein, 10 aa, Artificial Sequence
  Description of Artificial Sequence: Synthetic epitope
SAVSTPSKVK

SEQ ID NO: 43866 - protein, 10 aa, Artificial Sequence
  Description of Artificial Sequence: Synthetic epitope
SAVTENIKAL

SEQ ID NO: 43867 - protein, 10 aa, Artificial Sequence
  Description of Artificial Sequence: Synthetic epitope
SAVTQVADGS

SEQ ID NO: 43868 - protein, 10 aa, Artificial Sequence
  Description of Artificial Sequence: Synthetic epitope
SAVTYIISMF

SEQ ID NO: 43869 - protein, 10 aa, Artificial Sequence
  Description of Artificial Sequence: Synthetic epitope
SAWGKSRKKN

SEQ ID NO: 43870 - protein, 10 aa, Artificial Sequence
  Description of Artificial Sequence: Synthetic epitope
SAWKQFTQMK

SEQ ID NO: 43871 - protein, 10 aa, Artificial Sequence
  Description of Artificial Sequence: Synthetic epitope
SAWTITGVSE

SEQ ID NO: 43872 - protein, 10 aa, Artificial Sequence
  Description of Artificial Sequence: Synthetic epitope
SAYDVKNIKR

SEQ ID NO: 43873 - protein, 10 aa, Artificial Sequence
  Description of Artificial Sequence: Synthetic epitope
SAYPKYTFHD

SEQ ID NO: 43874 - protein, 10 aa, Artificial Sequence
  Description of Artificial Sequence: Synthetic epitope
SAYQKSEQQR

SEQ ID NO: 43875 - protein, 10 aa, Artificial Sequence
  Description of Artificial Sequence: Synthetic epitope
SAYRSSVLSN

SEQ ID NO: 43876 - protein, 10 aa, Artificial Sequence
  Description of Artificial Sequence: Synthetic epitope
SAYSQVYHPN

SEQ ID NO: 43877 - protein, 10 aa, Artificial Sequence
  Description of Artificial Sequence: Synthetic epitope
SDADDVVSAM

SEQ ID NO: 43878 - protein, 10 aa, Artificial Sequence
  Description of Artificial Sequence: Synthetic epitope
SDADTATALT

SEQ ID NO: 43879 - protein, 10 aa, Artificial Sequence
  Description of Artificial Sequence: Synthetic epitope
SDAEAVKKAA

SEQ ID NO: 43880 - protein, 10 aa, Artificial Sequence
  Description of Artificial Sequence: Synthetic epitope
SDAFLGELAE

SEQ ID NO: 43881 - protein, 10 aa, Artificial Sequence
  Description of Artificial Sequence: Synthetic epitope
SDAFTALDPL

SEQ ID NO: 43882 - protein, 10 aa, Artificial Sequence
  Description of Artificial Sequence: Synthetic epitope
SDAGKKESDD

SEQ ID NO: 43883 - protein, 10 aa, Artificial Sequence
  Description of Artificial Sequence: Synthetic epitope
SDALLSKDRY

SEQ ID NO: 43884 - protein, 10 aa, Artificial Sequence
  Description of Artificial Sequence: Synthetic epitope
SDALVLIHHK

SEQ ID NO: 43885 - protein, 10 aa, Artificial Sequence
  Description of Artificial Sequence: Synthetic epitope
SDAMAILHKL

SEQ ID NO: 43886 - protein, 10 aa, Artificial Sequence
  Description of Artificial Sequence: Synthetic epitope
SDAPPLKSGL

SEQ ID NO: 43887 - protein, 10 aa, Artificial Sequence
  Description of Artificial Sequence: Synthetic epitope
SDARTILEEN

SEQ ID NO: 43888 - protein, 10 aa, Artificial Sequence
  Description of Artificial Sequence: Synthetic epitope
SDASGLNTST

SEQ ID NO: 43889 - protein, 10 aa, Artificial Sequence
  Description of Artificial Sequence: Synthetic epitope
SDASQVNATV

SEQ ID NO: 43890 - protein, 10 aa, Artificial Sequence
  Description of Artificial Sequence: Synthetic epitope
SDASSEKLFN

SEQ ID NO: 43891 - protein, 10 aa, Artificial Sequence
  Description of Artificial Sequence: Synthetic epitope
SDASVMKLSE

SEQ ID NO: 43892 - protein, 10 aa, Artificial Sequence
  Description of Artificial Sequence: Synthetic epitope
SDATMESITA

SEQ ID NO: 43893 - protein, 10 aa, Artificial Sequence
  Description of Artificial Sequence: Synthetic epitope
SDATSKAHQL

SEQ ID NO: 43894 - protein, 10 aa, Artificial Sequence
  Description of Artificial Sequence: Synthetic epitope
SDATVKILIT

SEQ ID NO: 43895 - protein, 10 aa, Artificial Sequence
  Description of Artificial Sequence: Synthetic epitope
SDAVNLISQA

SEQ ID NO: 43896 - protein, 10 aa, Artificial Sequence
  Description of Artificial Sequence: Synthetic epitope
SDAVQMQREW

SEQ ID NO: 43897 - protein, 10 aa, Artificial Sequence
  Description of Artificial Sequence: Synthetic epitope
SDDAASQISH

SEQ ID NO: 43898 - protein, 10 aa, Artificial Sequence
  Description of Artificial Sequence: Synthetic epitope
SDDAESSEPE

SEQ ID NO: 43899 - protein, 10 aa, Artificial Sequence
  Description of Artificial Sequence: Synthetic epitope
SDDASQENNM

SEQ ID NO: 43900 - protein, 10 aa, Artificial Sequence
  Description of Artificial Sequence: Synthetic epitope
SDDEKDEHTS

SEQ ID NO: 43901 - protein, 10 aa, Artificial Sequence
  Description of Artificial Sequence: Synthetic epitope
SDDEKSSPET

SEQ ID NO: 43902 - protein, 10 aa, Artificial Sequence
  Description of Artificial Sequence: Synthetic epitope
SDDETLESEA

SEQ ID NO: 43903 - protein, 10 aa, Artificial Sequence
  Description of Artificial Sequence: Synthetic epitope
SDDITKSSQM

SEQ ID NO: 43904 - protein, 10 aa, Artificial Sequence
  Description of Artificial Sequence: Synthetic epitope
SDDKEAQLKQ

SEQ ID NO: 43905 - protein, 10 aa, Artificial Sequence
  Description of Artificial Sequence: Synthetic epitope
SDDLSLIRKN

SEQ ID NO: 43906 - protein, 10 aa, Artificial Sequence
  Description of Artificial Sequence: Synthetic epitope
SDDNESNSES

SEQ ID NO: 43907 - protein, 10 aa, Artificial Sequence
  Description of Artificial Sequence: Synthetic epitope
SDDNKINNLL

SEQ ID NO: 43908 - protein, 10 aa, Artificial Sequence
  Description of Artificial Sequence: Synthetic epitope
SDDNMGAKNT

SEQ ID NO: 43909 - protein, 10 aa, Artificial Sequence
  Description of Artificial Sequence: Synthetic epitope
SDDPFKSKQD

SEQ ID NO: 43910 - protein, 10 aa, Artificial Sequence
  Description of Artificial Sequence: Synthetic epitope
SDDRVSSKEH

SEQ ID NO: 43911 - protein, 10 aa, Artificial Sequence
  Description of Artificial Sequence: Synthetic epitope
SDDSESIEES

SEQ ID NO: 43912 - protein, 10 aa, Artificial Sequence
  Description of Artificial Sequence: Synthetic epitope
SDDYLVKEQL

SEQ ID NO: 43913 - protein, 10 aa, Artificial Sequence
  Description of Artificial Sequence: Synthetic epitope
SDDYPMSREE

SEQ ID NO: 43914 - protein, 10 aa, Artificial Sequence
  Description of Artificial Sequence: Synthetic epitope
SDEASLIVNE

SEQ ID NO: 43915 - protein, 10 aa, Artificial Sequence
  Description of Artificial Sequence: Synthetic epitope
SDEDEHSDSG

SEQ ID NO: 43916 - protein, 10 aa, Artificial Sequence
  Description of Artificial Sequence: Synthetic epitope
SDEEASFESE

SEQ ID NO: 43917 - protein, 10 aa, Artificial Sequence
  Description of Artificial Sequence: Synthetic epitope
SDEEDTMSRF

SEQ ID NO: 43918 - protein, 10 aa, Artificial Sequence
  Description of Artificial Sequence: Synthetic epitope
SDEETSKEME

SEQ ID NO: 43919 - protein, 10 aa, Artificial Sequence
  Description of Artificial Sequence: Synthetic epitope
SDEIVVYEMP

SEQ ID NO: 43920 - protein, 10 aa, Artificial Sequence
  Description of Artificial Sequence: Synthetic epitope
SDELQAFVLK

SEQ ID NO: 43921 - protein, 10 aa, Artificial Sequence
  Description of Artificial Sequence: Synthetic epitope
SDELSNIAMQ

SEQ ID NO: 43922 - protein, 10 aa, Artificial Sequence
  Description of Artificial Sequence: Synthetic epitope
SDEPAKTKKG

SEQ ID NO: 43923 - protein, 10 aa, Artificial Sequence
  Description of Artificial Sequence: Synthetic epitope
SDEPEISDSY

SEQ ID NO: 43924 - protein, 10 aa, Artificial Sequence
  Description of Artificial Sequence: Synthetic epitope
SDEPKKSVAF

SEQ ID NO: 43925 - protein, 10 aa, Artificial Sequence
  Description of Artificial Sequence: Synthetic epitope
SDESLQQHIE

SEQ ID NO: 43926 - protein, 10 aa, Artificial Sequence
  Description of Artificial Sequence: Synthetic epitope
SDESLSVSHF

SEQ ID NO: 43927 - protein, 10 aa, Artificial Sequence
  Description of Artificial Sequence: Synthetic epitope
SDESMIKDRK

SEQ ID NO: 43928 - protein, 10 aa, Artificial Sequence
  Description of Artificial Sequence: Synthetic epitope
SDETETLKNS

SEQ ID NO: 43929 - protein, 10 aa, Artificial Sequence
  Description of Artificial Sequence: Synthetic epitope
SDETLAQEFS

SEQ ID NO: 43930 - protein, 10 aa, Artificial Sequence
  Description of Artificial Sequence: Synthetic epitope
SDETMVRIFS

SEQ ID NO: 43931 - protein, 10 aa, Artificial Sequence
  Description of Artificial Sequence: Synthetic epitope
SDETSSANGD

SEQ ID NO: 43932 - protein, 10 aa, Artificial Sequence
  Description of Artificial Sequence: Synthetic epitope
SDETTESPTV

SEQ ID NO: 43933 - protein, 10 aa, Artificial Sequence
  Description of Artificial Sequence: Synthetic epitope
SDEVSTKILM

SEQ ID NO: 43934 - protein, 10 aa, Artificial Sequence
  Description of Artificial Sequence: Synthetic epitope
SDFDRKELMN

SEQ ID NO: 43935 - protein, 10 aa, Artificial Sequence
  Description of Artificial Sequence: Synthetic epitope
SDFISQLKIK

SEQ ID NO: 43936 - protein, 10 aa, Artificial Sequence
  Description of Artificial Sequence: Synthetic epitope
SDFQAKGHEE

SEQ ID NO: 43937 - protein, 10 aa, Artificial Sequence
  Description of Artificial Sequence: Synthetic epitope
SDFQSRDSSQ

SEQ ID NO: 43938 - protein, 10 aa, Artificial Sequence
  Description of Artificial Sequence: Synthetic epitope
SDFSANEQKS

SEQ ID NO: 43939 - protein, 10 aa, Artificial Sequence
  Description of Artificial Sequence: Synthetic epitope
SDFSLKKESY

SEQ ID NO: 43940 - protein, 10 aa, Artificial Sequence
  Description of Artificial Sequence: Synthetic epitope
SDFTSTLQSI

SEQ ID NO: 43941 - protein, 10 aa, Artificial Sequence
  Description of Artificial Sequence: Synthetic epitope
SDFVESEAEE

SEQ ID NO: 43942 - protein, 10 aa, Artificial Sequence
  Description of Artificial Sequence: Synthetic epitope
SDFVLAGTVI

SEQ ID NO: 43943 - protein, 10 aa, Artificial Sequence
  Description of Artificial Sequence: Synthetic epitope
SDFWQQSKQI

SEQ ID NO: 43944 - protein, 10 aa, Artificial Sequence
  Description of Artificial Sequence: Synthetic epitope
SDGATNSTTA

SEQ ID NO: 43945 - protein, 10 aa, Artificial Sequence
  Description of Artificial Sequence: Synthetic epitope
SDGDIAMRRD

SEQ ID NO: 43946 - protein, 10 aa, Artificial Sequence
  Description of Artificial Sequence: Synthetic epitope
SDGIAMLVAG

SEQ ID NO: 43947 - protein, 10 aa, Artificial Sequence
  Description of Artificial Sequence: Synthetic epitope
SDGINSEVLE

SEQ ID NO: 43948 - protein, 10 aa, Artificial Sequence
  Description of Artificial Sequence: Synthetic epitope
SDGKKGSKVF

SEQ ID NO: 43949 - protein, 10 aa, Artificial Sequence
  Description of Artificial Sequence: Synthetic epitope
SDGKVGESSK

SEQ ID NO: 43950 - protein, 10 aa, Artificial Sequence
  Description of Artificial Sequence: Synthetic epitope
SDGLKLLSHE

SEQ ID NO: 43951 - protein, 10 aa, Artificial Sequence
  Description of Artificial Sequence: Synthetic epitope
SDGQSMERAE

SEQ ID NO: 43952 - protein, 10 aa, Artificial Sequence
  Description of Artificial Sequence: Synthetic epitope
SDGQVMTLPV

SEQ ID NO: 43953 - protein, 10 aa, Artificial Sequence
  Description of Artificial Sequence: Synthetic epitope
SDGVEVSDVL

SEQ ID NO: 43954 - protein, 10 aa, Artificial Sequence
  Description of Artificial Sequence: Synthetic epitope
SDGVWRVKSI

SEQ ID NO: 43955 - protein, 10 aa, Artificial Sequence
  Description of Artificial Sequence: Synthetic epitope
SDHASAMNKR

SEQ ID NO: 43956 - protein, 10 aa, Artificial Sequence
  Description of Artificial Sequence: Synthetic epitope
SDHKAEVDKS

SEQ ID NO: 43957 - protein, 10 aa, Artificial Sequence
  Description of Artificial Sequence: Synthetic epitope
SDHPKSTGEP

SEQ ID NO: 43958 - protein, 10 aa, Artificial Sequence
  Description of Artificial Sequence: Synthetic epitope
SDHRLSYSSQ

SEQ ID NO: 43959 - protein, 10 aa, Artificial Sequence
  Description of Artificial Sequence: Synthetic epitope
SDHTRVDEYY

SEQ ID NO: 43960 - protein, 10 aa, Artificial Sequence
  Description of Artificial Sequence: Synthetic epitope
SDHTSRESNY

SEQ ID NO: 43961 - protein, 10 aa, Artificial Sequence
  Description of Artificial Sequence: Synthetic epitope
SDHWIGLKMA

SEQ ID NO: 43962 - protein, 10 aa, Artificial Sequence
  Description of Artificial Sequence: Synthetic epitope
SDIASAEENQ

SEQ ID NO: 43963 - protein, 10 aa, Artificial Sequence
  Description of Artificial Sequence: Synthetic epitope
SDIDAESITS

SEQ ID NO: 43964 - protein, 10 aa, Artificial Sequence
  Description of Artificial Sequence: Synthetic epitope
SDIESVERKI

SEQ ID NO: 43965 - protein, 10 aa, Artificial Sequence
  Description of Artificial Sequence: Synthetic epitope
SDIILGTEPP

SEQ ID NO: 43966 - protein, 10 aa, Artificial Sequence
  Description of Artificial Sequence: Synthetic epitope
SDILATSKYE

SEQ ID NO: 43967 - protein, 10 aa, Artificial Sequence
  Description of Artificial Sequence: Synthetic epitope
SDILRMDSTN

SEQ ID NO: 43968 - protein, 10 aa, Artificial Sequence
  Description of Artificial Sequence: Synthetic epitope
SDIQSLLSLT

SEQ ID NO: 43969 - protein, 10 aa, Artificial Sequence
  Description of Artificial Sequence: Synthetic epitope
SDIQVNAEFD

SEQ ID NO: 43970 - protein, 10 aa, Artificial Sequence
  Description of Artificial Sequence: Synthetic epitope
SDISLPIATQ

SEQ ID NO: 43971 - protein, 10 aa, Artificial Sequence
  Description of Artificial Sequence: Synthetic epitope
SDISSLSEKT

SEQ ID NO: 43972 - protein, 10 aa, Artificial Sequence
  Description of Artificial Sequence: Synthetic epitope
SDITLYKAKT

SEQ ID NO: 43973 - protein, 10 aa, Artificial Sequence
  Description of Artificial Sequence: Synthetic epitope
SDIVESSTSY

SEQ ID NO: 43974 - protein, 10 aa, Artificial Sequence
  Description of Artificial Sequence: Synthetic epitope
SDIVGASRTS

SEQ ID NO: 43975 - protein, 10 aa, Artificial Sequence
  Description of Artificial Sequence: Synthetic epitope
SDIVSRFQKD

SEQ ID NO: 43976 - protein, 10 aa, Artificial Sequence
  Description of Artificial Sequence: Synthetic epitope
SDKEEHEQND

SEQ ID NO: 43977 - protein, 10 aa, Artificial Sequence
  Description of Artificial Sequence: Synthetic epitope
SDKEKEFSKK

SEQ ID NO: 43978 - protein, 10 aa, Artificial Sequence
  Description of Artificial Sequence: Synthetic epitope
SDKELTRPNE

SEQ ID NO: 43979 - protein, 10 aa, Artificial Sequence
  Description of Artificial Sequence: Synthetic epitope
SDKESVEQRS

SEQ ID NO: 43980 - protein, 10 aa, Artificial Sequence
  Description of Artificial Sequence: Synthetic epitope
SDKEVEIAYS

SEQ ID NO: 43981 - protein, 10 aa, Artificial Sequence
  Description of Artificial Sequence: Synthetic epitope
SDKEVREIVQ

SEQ ID NO: 43982 - protein, 10 aa, Artificial Sequence
  Description of Artificial Sequence: Synthetic epitope
SDKISKEVVP

SEQ ID NO: 43983 - protein, 10 aa, Artificial Sequence
  Description of Artificial Sequence: Synthetic epitope
SDKKGRYQKE

SEQ ID NO: 43984 - protein, 10 aa, Artificial Sequence
  Description of Artificial Sequence: Synthetic epitope
SDKKPAKDKS

SEQ ID NO: 43985 - protein, 10 aa, Artificial Sequence
  Description of Artificial Sequence: Synthetic epitope
SDKKQQYQTS

SEQ ID NO: 43986 - protein, 10 aa, Artificial Sequence
  Description of Artificial Sequence: Synthetic epitope
SDKKYSEQRL

SEQ ID NO: 43987 - protein, 10 aa, Artificial Sequence
  Description of Artificial Sequence: Synthetic epitope
SDKLKQIPQA

SEQ ID NO: 43988 - protein, 10 aa, Artificial Sequence
  Description of Artificial Sequence: Synthetic epitope
SDKNSSVNLK

SEQ ID NO: 43989 - protein, 10 aa, Artificial Sequence
  Description of Artificial Sequence: Synthetic epitope
SDKPKQRRPR

SEQ ID NO: 43990 - protein, 10 aa, Artificial Sequence
  Description of Artificial Sequence: Synthetic epitope
SDKQIALAVL

SEQ ID NO: 43991 - protein, 10 aa, Artificial Sequence
  Description of Artificial Sequence: Synthetic epitope
SDKRKQTQKE

SEQ ID NO: 43992 - protein, 10 aa, Artificial Sequence
  Description of Artificial Sequence: Synthetic epitope
SDKRTSSEKI

SEQ ID NO: 43993 - protein, 10 aa, Artificial Sequence
  Description of Artificial Sequence: Synthetic epitope
SDKSKLARHQ

SEQ ID NO: 43994 - protein, 10 aa, Artificial Sequence
  Description of Artificial Sequence: Synthetic epitope
SDKSKLKKSL

SEQ ID NO: 43995 - protein, 10 aa, Artificial Sequence
  Description of Artificial Sequence: Synthetic epitope
SDKSNKFEQG

SEQ ID NO: 43996 - protein, 10 aa, Artificial Sequence
  Description of Artificial Sequence: Synthetic epitope
SDKSTKMSFA

SEQ ID NO: 43997 - protein, 10 aa, Artificial Sequence
  Description of Artificial Sequence: Synthetic epitope
SDKSTKMSFA

SEQ ID NO: 43998 - protein, 10 aa, Artificial Sequence
  Description of Artificial Sequence: Synthetic epitope
SDKTMLSGQR

SEQ ID NO: 43999 - protein, 10 aa, Artificial Sequence
  Description of Artificial Sequence: Synthetic epitope
SDKTNGSKVD

SEQ ID NO: 44000 - protein, 10 aa, Artificial Sequence
  Description of Artificial Sequence: Synthetic epitope
SDKTSNLEAY

SEQ ID NO: 44001 - protein, 10 aa, Artificial Sequence
  Description of Artificial Sequence: Synthetic epitope
SDKTTLHELS

SEQ ID NO: 44002 - protein, 10 aa, Artificial Sequence
  Description of Artificial Sequence: Synthetic epitope
SDKTVLLTRR

SEQ ID NO: 44003 - protein, 10 aa, Artificial Sequence
  Description of Artificial Sequence: Synthetic epitope
SDKVANAVIN

SEQ ID NO: 44004 - protein, 10 aa, Artificial Sequence
  Description of Artificial Sequence: Synthetic epitope
SDKVTQKQFQ

SEQ ID NO: 44005 - protein, 10 aa, Artificial Sequence
  Description of Artificial Sequence: Synthetic epitope
SDLASARIIE

SEQ ID NO: 44006 - protein, 10 aa, Artificial Sequence
  Description of Artificial Sequence: Synthetic epitope
SDLASSGVVS

SEQ ID NO: 44007 - protein, 10 aa, Artificial Sequence
  Description of Artificial Sequence: Synthetic epitope
SDLDQASVSP

SEQ ID NO: 44008 - protein, 10 aa, Artificial Sequence
  Description of Artificial Sequence: Synthetic epitope
SDLDQSNVTE

SEQ ID NO: 44009 - protein, 10 aa, Artificial Sequence
  Description of Artificial Sequence: Synthetic epitope
SDLEDDETPQ

SEQ ID NO: 44010 - protein, 10 aa, Artificial Sequence
  Description of Artificial Sequence: Synthetic epitope
SDLEDEESAA

SEQ ID NO: 44011 - protein, 10 aa, Artificial Sequence
  Description of Artificial Sequence: Synthetic epitope
SDLETSEPKP

SEQ ID NO: 44012 - protein, 10 aa, Artificial Sequence
  Description of Artificial Sequence: Synthetic epitope
SDLHKIIVSP

SEQ ID NO: 44013 - protein, 10 aa, Artificial Sequence
  Description of Artificial Sequence: Synthetic epitope
SDLKAMTGRA

SEQ ID NO: 44014 - protein, 10 aa, Artificial Sequence
  Description of Artificial Sequence: Synthetic epitope
SDLKASKIGS

SEQ ID NO: 44015 - protein, 10 aa, Artificial Sequence
  Description of Artificial Sequence: Synthetic epitope
SDLKSLSVVT

SEQ ID NO: 44016 - protein, 10 aa, Artificial Sequence
  Description of Artificial Sequence: Synthetic epitope
SDLLSDLPTG

SEQ ID NO: 44017 - protein, 10 aa, Artificial Sequence
  Description of Artificial Sequence: Synthetic epitope
SDLQVQKMFV

SEQ ID NO: 44018 - protein, 10 aa, Artificial Sequence
  Description of Artificial Sequence: Synthetic epitope
SDLRSLQLKK

SEQ ID NO: 44019 - protein, 10 aa, Artificial Sequence
  Description of Artificial Sequence: Synthetic epitope
SDLSILQMSR

SEQ ID NO: 44020 - protein, 10 aa, Artificial Sequence
  Description of Artificial Sequence: Synthetic epitope
SDLSLLSTDS

SEQ ID NO: 44021 - protein, 10 aa, Artificial Sequence
  Description of Artificial Sequence: Synthetic epitope
SDLTKTEHPK

SEQ ID NO: 44022 - protein, 10 aa, Artificial Sequence
  Description of Artificial Sequence: Synthetic epitope
SDLTQAANKN

SEQ ID NO: 44023 - protein, 10 aa, Artificial Sequence
  Description of Artificial Sequence: Synthetic epitope
SDLTSSKAST

SEQ ID NO: 44024 - protein, 10 aa, Artificial Sequence
  Description of Artificial Sequence: Synthetic epitope
SDLTSTTNNP

SEQ ID NO: 44025 - protein, 10 aa, Artificial Sequence
  Description of Artificial Sequence: Synthetic epitope
SDLTTLVAFP

SEQ ID NO: 44026 - protein, 10 aa, Artificial Sequence
  Description of Artificial Sequence: Synthetic epitope
SDLTVSQDEE

SEQ ID NO: 44027 - protein, 10 aa, Artificial Sequence
  Description of Artificial Sequence: Synthetic epitope
SDLVGSASSA

SEQ ID NO: 44028 - protein, 10 aa, Artificial Sequence
  Description of Artificial Sequence: Synthetic epitope
SDLVSLQQSG

SEQ ID NO: 44029 - protein, 10 aa, Artificial Sequence
  Description of Artificial Sequence: Synthetic epitope
SDLYAVEMKK

SEQ ID NO: 44030 - protein, 10 aa, Artificial Sequence
  Description of Artificial Sequence: Synthetic epitope
SDMASSIIES

SEQ ID NO: 44031 - protein, 10 aa, Artificial Sequence
  Description of Artificial Sequence: Synthetic epitope
SDMFDQRLQS

SEQ ID NO: 44032 - protein, 10 aa, Artificial Sequence
  Description of Artificial Sequence: Synthetic epitope
SDMKVARSAT

SEQ ID NO: 44033 - protein, 10 aa, Artificial Sequence
  Description of Artificial Sequence: Synthetic epitope
SDMMVLDKQK

SEQ ID NO: 44034 - protein, 10 aa, Artificial Sequence
  Description of Artificial Sequence: Synthetic epitope
SDMQDSSLSH

SEQ ID NO: 44035 - protein, 10 aa, Artificial Sequence
  Description of Artificial Sequence: Synthetic epitope
SDMVVKAITD

SEQ ID NO: 44036 - protein, 10 aa, Artificial Sequence
  Description of Artificial Sequence: Synthetic epitope
SDNANAQQKT

SEQ ID NO: 44037 - protein, 10 aa, Artificial Sequence
  Description of Artificial Sequence: Synthetic epitope
SDNANAVKSE

SEQ ID NO: 44038 - protein, 10 aa, Artificial Sequence
  Description of Artificial Sequence: Synthetic epitope
SDNATAFSNR

SEQ ID NO: 44039 - protein, 10 aa, Artificial Sequence
  Description of Artificial Sequence: Synthetic epitope
SDNDLLQAAT

SEQ ID NO: 44040 - protein, 10 aa, Artificial Sequence
  Description of Artificial Sequence: Synthetic epitope
SDNIIMASKD

SEQ ID NO: 44041 - protein, 10 aa, Artificial Sequence
  Description of Artificial Sequence: Synthetic epitope
SDNILKLEKQ

SEQ ID NO: 44042 - protein, 10 aa, Artificial Sequence
  Description of Artificial Sequence: Synthetic epitope
SDNKHISSVN

SEQ ID NO: 44043 - protein, 10 aa, Artificial Sequence
  Description of Artificial Sequence: Synthetic epitope
SDNKTLLEFD

SEQ ID NO: 44044 - protein, 10 aa, Artificial Sequence
  Description of Artificial Sequence: Synthetic epitope
SDNTNHVDTK

SEQ ID NO: 44045 - protein, 10 aa, Artificial Sequence
  Description of Artificial Sequence: Synthetic epitope
SDNVADLHEK

SEQ ID NO: 44046 - protein, 10 aa, Artificial Sequence
  Description of Artificial Sequence: Synthetic epitope
SDPKTVLSAE

SEQ ID NO: 44047 - protein, 10 aa, Artificial Sequence
  Description of Artificial Sequence: Synthetic epitope
SDPLAQIAED

SEQ ID NO: 44048 - protein, 10 aa, Artificial Sequence
  Description of Artificial Sequence: Synthetic epitope
SDPLKILANA

SEQ ID NO: 44049 - protein, 10 aa, Artificial Sequence
  Description of Artificial Sequence: Synthetic epitope
SDPMSSMHFH

SEQ ID NO: 44050 - protein, 10 aa, Artificial Sequence
  Description of Artificial Sequence: Synthetic epitope
SDPPVNSQQM

SEQ ID NO: 44051 - protein, 10 aa, Artificial Sequence
  Description of Artificial Sequence: Synthetic epitope
SDPTKLSKQK

SEQ ID NO: 44052 - protein, 10 aa, Artificial Sequence
  Description of Artificial Sequence: Synthetic epitope
SDPTSKSSGQ

SEQ ID NO: 44053 - protein, 10 aa, Artificial Sequence
  Description of Artificial Sequence: Synthetic epitope
SDQAAVISKF

SEQ ID NO: 44054 - protein, 10 aa, Artificial Sequence
  Description of Artificial Sequence: Synthetic epitope
SDQELRQSAA

SEQ ID NO: 44055 - protein, 10 aa, Artificial Sequence
  Description of Artificial Sequence: Synthetic epitope
SDQEMNEDFS

SEQ ID NO: 44056 - protein, 10 aa, Artificial Sequence
  Description of Artificial Sequence: Synthetic epitope
SDQGPEEATT

SEQ ID NO: 44057 - protein, 10 aa, Artificial Sequence
  Description of Artificial Sequence: Synthetic epitope
SDQGTSNSTK

SEQ ID NO: 44058 - protein, 10 aa, Artificial Sequence
  Description of Artificial Sequence: Synthetic epitope
SDQRGALAAR

SEQ ID NO: 44059 - protein, 10 aa, Artificial Sequence
  Description of Artificial Sequence: Synthetic epitope
SDQSKEHPQH

SEQ ID NO: 44060 - protein, 10 aa, Artificial Sequence
  Description of Artificial Sequence: Synthetic epitope
SDQSVNFGFS

SEQ ID NO: 44061 - protein, 10 aa, Artificial Sequence
  Description of Artificial Sequence: Synthetic epitope
SDQTDQTSSN

SEQ ID NO: 44062 - protein, 10 aa, Artificial Sequence
  Description of Artificial Sequence: Synthetic epitope
SDQTKPLSNQ

SEQ ID NO: 44063 - protein, 10 aa, Artificial Sequence
  Description of Artificial Sequence: Synthetic epitope
SDQTLTTENM

SEQ ID NO: 44064 - protein, 10 aa, Artificial Sequence
  Description of Artificial Sequence: Synthetic epitope
SDQTSKESTS

SEQ ID NO: 44065 - protein, 10 aa, Artificial Sequence
  Description of Artificial Sequence: Synthetic epitope
SDQVILIARK

SEQ ID NO: 44066 - protein, 10 aa, Artificial Sequence
  Description of Artificial Sequence: Synthetic epitope
SDQVKISEEA

SEQ ID NO: 44067 - protein, 10 aa, Artificial Sequence
  Description of Artificial Sequence: Synthetic epitope
SDRAKVKTDD

SEQ ID NO: 44068 - protein, 10 aa, Artificial Sequence
  Description of Artificial Sequence: Synthetic epitope
SDRKSNSGSD

SEQ ID NO: 44069 - protein, 10 aa, Artificial Sequence
  Description of Artificial Sequence: Synthetic epitope
SDRQDSRSHS

SEQ ID NO: 44070 - protein, 10 aa, Artificial Sequence
  Description of Artificial Sequence: Synthetic epitope
SDRRNSGATF

SEQ ID NO: 44071 - protein, 10 aa, Artificial Sequence
  Description of Artificial Sequence: Synthetic epitope
SDRSSKTQAS

SEQ ID NO: 44072 - protein, 10 aa, Artificial Sequence
  Description of Artificial Sequence: Synthetic epitope
SDRSSVEREV

SEQ ID NO: 44073 - protein, 10 aa, Artificial Sequence
  Description of Artificial Sequence: Synthetic epitope
SDRVNMRTSS

SEQ ID NO: 44074 - protein, 10 aa, Artificial Sequence
  Description of Artificial Sequence: Synthetic epitope
SDSAERAERE

SEQ ID NO: 44075 - protein, 10 aa, Artificial Sequence
  Description of Artificial Sequence: Synthetic epitope
SDSALEAPEA

SEQ ID NO: 44076 - protein, 10 aa, Artificial Sequence
  Description of Artificial Sequence: Synthetic epitope
SDSARGIRIP

SEQ ID NO: 44077 - protein, 10 aa, Artificial Sequence
  Description of Artificial Sequence: Synthetic epitope
SDSASVQRAD

SEQ ID NO: 44078 - protein, 10 aa, Artificial Sequence
  Description of Artificial Sequence: Synthetic epitope
SDSDEMLAIL

SEQ ID NO: 44079 - protein, 10 aa, Artificial Sequence
  Description of Artificial Sequence: Synthetic epitope
SDSDSDTSEG

SEQ ID NO: 44080 - protein, 10 aa, Artificial Sequence
  Description of Artificial Sequence: Synthetic epitope
SDSDSNLSGE

SEQ ID NO: 44081 - protein, 10 aa, Artificial Sequence
  Description of Artificial Sequence: Synthetic epitope
SDSDSSQAGA

SEQ ID NO: 44082 - protein, 10 aa, Artificial Sequence
  Description of Artificial Sequence: Synthetic epitope
SDSDTENRSR

SEQ ID NO: 44083 - protein, 10 aa, Artificial Sequence
  Description of Artificial Sequence: Synthetic epitope
SDSDTRFEKP

SEQ ID NO: 44084 - protein, 10 aa, Artificial Sequence
  Description of Artificial Sequence: Synthetic epitope
SDSEANEPSQ

SEQ ID NO: 44085 - protein, 10 aa, Artificial Sequence
  Description of Artificial Sequence: Synthetic epitope
SDSEDLPVLD

SEQ ID NO: 44086 - protein, 10 aa, Artificial Sequence
  Description of Artificial Sequence: Synthetic epitope
SDSEIETNSA

SEQ ID NO: 44087 - protein, 10 aa, Artificial Sequence
  Description of Artificial Sequence: Synthetic epitope
SDSELSIPAK

SEQ ID NO: 44088 - protein, 10 aa, Artificial Sequence
  Description of Artificial Sequence: Synthetic epitope
SDSELSTMKK

SEQ ID NO: 44089 - protein, 10 aa, Artificial Sequence
  Description of Artificial Sequence: Synthetic epitope
SDSESESLAP

SEQ ID NO: 44090 - protein, 10 aa, Artificial Sequence
  Description of Artificial Sequence: Synthetic epitope
SDSESKTNIV

SEQ ID NO: 44091 - protein, 10 aa, Artificial Sequence
  Description of Artificial Sequence: Synthetic epitope
SDSESTVSPR

SEQ ID NO: 44092 - protein, 10 aa, Artificial Sequence
  Description of Artificial Sequence: Synthetic epitope
SDSFKTKDSF

SEQ ID NO: 44093 - protein, 10 aa, Artificial Sequence
  Description of Artificial Sequence: Synthetic epitope
SDSGITDVAM

SEQ ID NO: 44094 - protein, 10 aa, Artificial Sequence
  Description of Artificial Sequence: Synthetic epitope
SDSIRDRRNS

SEQ ID NO: 44095 - protein, 10 aa, Artificial Sequence
  Description of Artificial Sequence: Synthetic epitope
SDSISTSADN

SEQ ID NO: 44096 - protein, 10 aa, Artificial Sequence
  Description of Artificial Sequence: Synthetic epitope
SDSKIQKDSL

SEQ ID NO: 44097 - protein, 10 aa, Artificial Sequence
  Description of Artificial Sequence: Synthetic epitope
SDSKRLESGV

SEQ ID NO: 44098 - protein, 10 aa, Artificial Sequence
  Description of Artificial Sequence: Synthetic epitope
SDSKSIQKSE

SEQ ID NO: 44099 - protein, 10 aa, Artificial Sequence
  Description of Artificial Sequence: Synthetic epitope
SDSLLTSSKG

SEQ ID NO: 44100 - protein, 10 aa, Artificial Sequence
  Description of Artificial Sequence: Synthetic epitope
SDSLVVRGVA

SEQ ID NO: 44101 - protein, 10 aa, Artificial Sequence
  Description of Artificial Sequence: Synthetic epitope
SDSMETEEKT

SEQ ID NO: 44102 - protein, 10 aa, Artificial Sequence
  Description of Artificial Sequence: Synthetic epitope
SDSMRQEQSP

SEQ ID NO: 44103 - protein, 10 aa, Artificial Sequence
  Description of Artificial Sequence: Synthetic epitope
SDSNGHEDSR

SEQ ID NO: 44104 - protein, 10 aa, Artificial Sequence
  Description of Artificial Sequence: Synthetic epitope
SDSQNVVQPP

SEQ ID NO: 44105 - protein, 10 aa, Artificial Sequence
  Description of Artificial Sequence: Synthetic epitope
SDSRKSMRQS

SEQ ID NO: 44106 - protein, 10 aa, Artificial Sequence
  Description of Artificial Sequence: Synthetic epitope
SDSRSSDRET

SEQ ID NO: 44107 - protein, 10 aa, Artificial Sequence
  Description of Artificial Sequence: Synthetic epitope
SDSSAFSKPG

SEQ ID NO: 44108 - protein, 10 aa, Artificial Sequence
  Description of Artificial Sequence: Synthetic epitope
SDSSAKLILQ

SEQ ID NO: 44109 - protein, 10 aa, Artificial Sequence
  Description of Artificial Sequence: Synthetic epitope
SDSSKSRTPR

SEQ ID NO: 44110 - protein, 10 aa, Artificial Sequence
  Description of Artificial Sequence: Synthetic epitope
SDSSTLESTL

SEQ ID NO: 44111 - protein, 10 aa, Artificial Sequence
  Description of Artificial Sequence: Synthetic epitope
SDSTEQSPHS

SEQ ID NO: 44112 - protein, 10 aa, Artificial Sequence
  Description of Artificial Sequence: Synthetic epitope
SDSTESNEAT

SEQ ID NO: 44113 - protein, 10 aa, Artificial Sequence
  Description of Artificial Sequence: Synthetic epitope
SDSTMRILSN

SEQ ID NO: 44114 - protein, 10 aa, Artificial Sequence
  Description of Artificial Sequence: Synthetic epitope
SDSTTEITYS

SEQ ID NO: 44115 - protein, 10 aa, Artificial Sequence
  Description of Artificial Sequence: Synthetic epitope
SDSVALHQRE

SEQ ID NO: 44116 - protein, 10 aa, Artificial Sequence
  Description of Artificial Sequence: Synthetic epitope
SDSVKDSQSP

SEQ ID NO: 44117 - protein, 10 aa, Artificial Sequence
  Description of Artificial Sequence: Synthetic epitope
SDSVSTLNSE

SEQ ID NO: 44118 - protein, 10 aa, Artificial Sequence
  Description of Artificial Sequence: Synthetic epitope
SDSYDSLSEA

SEQ ID NO: 44119 - protein, 10 aa, Artificial Sequence
  Description of Artificial Sequence: Synthetic epitope
SDTDDNKDSA

SEQ ID NO: 44120 - protein, 10 aa, Artificial Sequence
  Description of Artificial Sequence: Synthetic epitope
SDTELEQTDS

SEQ ID NO: 44121 - protein, 10 aa, Artificial Sequence
  Description of Artificial Sequence: Synthetic epitope
SDTEVSGSSH

SEQ ID NO: 44122 - protein, 10 aa, Artificial Sequence
  Description of Artificial Sequence: Synthetic epitope
SDTIADLPDP

SEQ ID NO: 44123 - protein, 10 aa, Artificial Sequence
  Description of Artificial Sequence: Synthetic epitope
SDTISDALLT

SEQ ID NO: 44124 - protein, 10 aa, Artificial Sequence
  Description of Artificial Sequence: Synthetic epitope
SDTKDVSRST

SEQ ID NO: 44125 - protein, 10 aa, Artificial Sequence
  Description of Artificial Sequence: Synthetic epitope
SDTPTTLASH

SEQ ID NO: 44126 - protein, 10 aa, Artificial Sequence
  Description of Artificial Sequence: Synthetic epitope
SDTQSSESHV

SEQ ID NO: 44127 - protein, 10 aa, Artificial Sequence
  Description of Artificial Sequence: Synthetic epitope
SDTQVDEVKS

SEQ ID NO: 44128 - protein, 10 aa, Artificial Sequence
  Description of Artificial Sequence: Synthetic epitope
SDTSANTVSM

SEQ ID NO: 44129 - protein, 10 aa, Artificial Sequence
  Description of Artificial Sequence: Synthetic epitope
SDTSKSTYSL

SEQ ID NO: 44130 - protein, 10 aa, Artificial Sequence
  Description of Artificial Sequence: Synthetic epitope
SDTSTELSYI

SEQ ID NO: 44131 - protein, 10 aa, Artificial Sequence
  Description of Artificial Sequence: Synthetic epitope
SDTSTSRAGR

SEQ ID NO: 44132 - protein, 10 aa, Artificial Sequence
  Description of Artificial Sequence: Synthetic epitope
SDTSVQRSLV

SEQ ID NO: 44133 - protein, 10 aa, Artificial Sequence
  Description of Artificial Sequence: Synthetic epitope
SDTTHASKVP

SEQ ID NO: 44134 - protein, 10 aa, Artificial Sequence
  Description of Artificial Sequence: Synthetic epitope
SDTTKSDLSN

SEQ ID NO: 44135 - protein, 10 aa, Artificial Sequence
  Description of Artificial Sequence: Synthetic epitope
SDTTLEKKMA

SEQ ID NO: 44136 - protein, 10 aa, Artificial Sequence
  Description of Artificial Sequence: Synthetic epitope
SDTTVVAQKV

SEQ ID NO: 44137 - protein, 10 aa, Artificial Sequence
  Description of Artificial Sequence: Synthetic epitope
SDTVSSWTVR

SEQ ID NO: 44138 - protein, 10 aa, Artificial Sequence
  Description of Artificial Sequence: Synthetic epitope
SDTVSTTRSG

SEQ ID NO: 44139 - protein, 10 aa, Artificial Sequence
  Description of Artificial Sequence: Synthetic epitope
SDTYSSAGDS

SEQ ID NO: 44140 - protein, 10 aa, Artificial Sequence
  Description of Artificial Sequence: Synthetic epitope
SDVAQLSDPG

SEQ ID NO: 44141 - protein, 10 aa, Artificial Sequence
  Description of Artificial Sequence: Synthetic epitope
SDVAVKTLQN

SEQ ID NO: 44142 - protein, 10 aa, Artificial Sequence
  Description of Artificial Sequence: Synthetic epitope
SDVDFSEILN

SEQ ID NO: 44143 - protein, 10 aa, Artificial Sequence
  Description of Artificial Sequence: Synthetic epitope
SDVDTSAQLE

SEQ ID NO: 44144 - protein, 10 aa, Artificial Sequence
  Description of Artificial Sequence: Synthetic epitope
SDVESLDKLM

SEQ ID NO: 44145 - protein, 10 aa, Artificial Sequence
  Description of Artificial Sequence: Synthetic epitope
SDVEVSSPKR

SEQ ID NO: 44146 - protein, 10 aa, Artificial Sequence
  Description of Artificial Sequence: Synthetic epitope
SDVGANQTVL

SEQ ID NO: 44147 - protein, 10 aa, Artificial Sequence
  Description of Artificial Sequence: Synthetic epitope
SDVIPQAEKA

SEQ ID NO: 44148 - protein, 10 aa, Artificial Sequence
  Description of Artificial Sequence: Synthetic epitope
SDVKTMLSKL

SEQ ID NO: 44149 - protein, 10 aa, Artificial Sequence
  Description of Artificial Sequence: Synthetic epitope
SDVLDKASSL

SEQ ID NO: 44150 - protein, 10 aa, Artificial Sequence
  Description of Artificial Sequence: Synthetic epitope
SDVQADGALG

SEQ ID NO: 44151 - protein, 10 aa, Artificial Sequence
  Description of Artificial Sequence: Synthetic epitope
SDVQESTQES

SEQ ID NO: 44152 - protein, 10 aa, Artificial Sequence
  Description of Artificial Sequence: Synthetic epitope
SDVQFKMSHK

SEQ ID NO: 44153 - protein, 10 aa, Artificial Sequence
  Description of Artificial Sequence: Synthetic epitope
SDVQLIKTGD

SEQ ID NO: 44154 - protein, 10 aa, Artificial Sequence
  Description of Artificial Sequence: Synthetic epitope
SDVQLIKTGD

SEQ ID NO: 44155 - protein, 10 aa, Artificial Sequence
  Description of Artificial Sequence: Synthetic epitope
SDVQNFPYMN

SEQ ID NO: 44156 - protein, 10 aa, Artificial Sequence
  Description of Artificial Sequence: Synthetic epitope
SDVQQLSEDE

SEQ ID NO: 44157 - protein, 10 aa, Artificial Sequence
  Description of Artificial Sequence: Synthetic epitope
SDVQSMDSSL

SEQ ID NO: 44158 - protein, 10 aa, Artificial Sequence
  Description of Artificial Sequence: Synthetic epitope
SDVSATKIPH

SEQ ID NO: 44159 - protein, 10 aa, Artificial Sequence
  Description of Artificial Sequence: Synthetic epitope
SDVSLVSNSF

SEQ ID NO: 44160 - protein, 10 aa, Artificial Sequence
  Description of Artificial Sequence: Synthetic epitope
SDVSRSDENV

SEQ ID NO: 44161 - protein, 10 aa, Artificial Sequence
  Description of Artificial Sequence: Synthetic epitope
SDVSSTIQTK

SEQ ID NO: 44162 - protein, 10 aa, Artificial Sequence
  Description of Artificial Sequence: Synthetic epitope
SDVTANTLLA

SEQ ID NO: 44163 - protein, 10 aa, Artificial Sequence
  Description of Artificial Sequence: Synthetic epitope
SDVTHEMKHK

SEQ ID NO: 44164 - protein, 10 aa, Artificial Sequence
  Description of Artificial Sequence: Synthetic epitope
SDVTQNSEQP

SEQ ID NO: 44165 - protein, 10 aa, Artificial Sequence
  Description of Artificial Sequence: Synthetic epitope
SDVTSLKSFD

SEQ ID NO: 44166 - protein, 10 aa, Artificial Sequence
  Description of Artificial Sequence: Synthetic epitope
SDVTSTKGNE

SEQ ID NO: 44167 - protein, 10 aa, Artificial Sequence
  Description of Artificial Sequence: Synthetic epitope
SDVVAMSKVE

SEQ ID NO: 44168 - protein, 10 aa, Artificial Sequence
  Description of Artificial Sequence: Synthetic epitope
SDVVRDDILL

SEQ ID NO: 44169 - protein, 10 aa, Artificial Sequence
  Description of Artificial Sequence: Synthetic epitope
SDWTASKGTH

SEQ ID NO: 44170 - protein, 10 aa, Artificial Sequence
  Description of Artificial Sequence: Synthetic epitope
SDWTKAVFSP

SEQ ID NO: 44171 - protein, 10 aa, Artificial Sequence
  Description of Artificial Sequence: Synthetic epitope
SDYESVQGLP

SEQ ID NO: 44172 - protein, 10 aa, Artificial Sequence
  Description of Artificial Sequence: Synthetic epitope
SDYHTVNVDV

SEQ ID NO: 44173 - protein, 10 aa, Artificial Sequence
  Description of Artificial Sequence: Synthetic epitope
SDYKDVSTEG

SEQ ID NO: 44174 - protein, 10 aa, Artificial Sequence
  Description of Artificial Sequence: Synthetic epitope
SDYQYSWMQK

SEQ ID NO: 44175 - protein, 10 aa, Artificial Sequence
  Description of Artificial Sequence: Synthetic epitope
SDYSLASDSG

SEQ ID NO: 44176 - protein, 10 aa, Artificial Sequence
  Description of Artificial Sequence: Synthetic epitope
SDYVKVSNIS

SEQ ID NO: 44177 - protein, 10 aa, Artificial Sequence
  Description of Artificial Sequence: Synthetic epitope
SEAAISSDGL

SEQ ID NO: 44178 - protein, 10 aa, Artificial Sequence
  Description of Artificial Sequence: Synthetic epitope
SEAAKTEDTV

SEQ ID NO: 44179 - protein, 10 aa, Artificial Sequence
  Description of Artificial Sequence: Synthetic epitope
SEAANSLEQA

SEQ ID NO: 44180 - protein, 10 aa, Artificial Sequence
  Description of Artificial Sequence: Synthetic epitope
SEAAQNKGGI

SEQ ID NO: 44181 - protein, 10 aa, Artificial Sequence
  Description of Artificial Sequence: Synthetic epitope
SEADITIVTD

SEQ ID NO: 44182 - protein, 10 aa, Artificial Sequence
  Description of Artificial Sequence: Synthetic epitope
SEADKERARN

SEQ ID NO: 44183 - protein, 10 aa, Artificial Sequence
  Description of Artificial Sequence: Synthetic epitope
SEADSQSEDD

SEQ ID NO: 44184 - protein, 10 aa, Artificial Sequence
  Description of Artificial Sequence: Synthetic epitope
SEAEEIDSEK

SEQ ID NO: 44185 - protein, 10 aa, Artificial Sequence
  Description of Artificial Sequence: Synthetic epitope
SEAEEQYAHA

SEQ ID NO: 44186 - protein, 10 aa, Artificial Sequence
  Description of Artificial Sequence: Synthetic epitope
SEAEETVSVG

SEQ ID NO: 44187 - protein, 10 aa, Artificial Sequence
  Description of Artificial Sequence: Synthetic epitope
SEAEKAENED

SEQ ID NO: 44188 - protein, 10 aa, Artificial Sequence
  Description of Artificial Sequence: Synthetic epitope
SEAELLTKTL

SEQ ID NO: 44189 - protein, 10 aa, Artificial Sequence
  Description of Artificial Sequence: Synthetic epitope
SEAEPVEQFS

SEQ ID NO: 44190 - protein, 10 aa, Artificial Sequence
  Description of Artificial Sequence: Synthetic epitope
SEAESLETNS

SEQ ID NO: 44191 - protein, 10 aa, Artificial Sequence
  Description of Artificial Sequence: Synthetic epitope
SEAEVLDHSK

SEQ ID NO: 44192 - protein, 10 aa, Artificial Sequence
  Description of Artificial Sequence: Synthetic epitope
SEAGLTANQY

SEQ ID NO: 44193 - protein, 10 aa, Artificial Sequence
  Description of Artificial Sequence: Synthetic epitope
SEAKALGESI

SEQ ID NO: 44194 - protein, 10 aa, Artificial Sequence
  Description of Artificial Sequence: Synthetic epitope
SEAKEKNTQN

SEQ ID NO: 44195 - protein, 10 aa, Artificial Sequence
  Description of Artificial Sequence: Synthetic epitope
SEAKHMSLKM

SEQ ID NO: 44196 - protein, 10 aa, Artificial Sequence
  Description of Artificial Sequence: Synthetic epitope
SEAKKGSKFD

SEQ ID NO: 44197 - protein, 10 aa, Artificial Sequence
  Description of Artificial Sequence: Synthetic epitope
SEAKLEENSD

SEQ ID NO: 44198 - protein, 10 aa, Artificial Sequence
  Description of Artificial Sequence: Synthetic epitope
SEAKQENENM

SEQ ID NO: 44199 - protein, 10 aa, Artificial Sequence
  Description of Artificial Sequence: Synthetic epitope
SEAKRSENVD

SEQ ID NO: 44200 - protein, 10 aa, Artificial Sequence
  Description of Artificial Sequence: Synthetic epitope
SEALLTVSAK

SEQ ID NO: 44201 - protein, 10 aa, Artificial Sequence
  Description of Artificial Sequence: Synthetic epitope
SEALSSTSRL

SEQ ID NO: 44202 - protein, 10 aa, Artificial Sequence
  Description of Artificial Sequence: Synthetic epitope
SEAMEKSAHQ

SEQ ID NO: 44203 - protein, 10 aa, Artificial Sequence
  Description of Artificial Sequence: Synthetic epitope
SEAMKLDKDG

SEQ ID NO: 44204 - protein, 10 aa, Artificial Sequence
  Description of Artificial Sequence: Synthetic epitope
SEAMMKSLKY

SEQ ID NO: 44205 - protein, 10 aa, Artificial Sequence
  Description of Artificial Sequence: Synthetic epitope
SEAPASEASS

SEQ ID NO: 44206 - protein, 10 aa, Artificial Sequence
  Description of Artificial Sequence: Synthetic epitope
SEAQQKAAQD

SEQ ID NO: 44207 - protein, 10 aa, Artificial Sequence
  Description of Artificial Sequence: Synthetic epitope
SEAQTTDSDD

SEQ ID NO: 44208 - protein, 10 aa, Artificial Sequence
  Description of Artificial Sequence: Synthetic epitope
SEARAGDKES

SEQ ID NO: 44209 - protein, 10 aa, Artificial Sequence
  Description of Artificial Sequence: Synthetic epitope
SEARDSMLKV

SEQ ID NO: 44210 - protein, 10 aa, Artificial Sequence
  Description of Artificial Sequence: Synthetic epitope
SEARESVLGA

SEQ ID NO: 44211 - protein, 10 aa, Artificial Sequence
  Description of Artificial Sequence: Synthetic epitope
SEASEYQTDQ

SEQ ID NO: 44212 - protein, 10 aa, Artificial Sequence
  Description of Artificial Sequence: Synthetic epitope
SEASGGRAEN

SEQ ID NO: 44213 - protein, 10 aa, Artificial Sequence
  Description of Artificial Sequence: Synthetic epitope
SEASHKHKET

SEQ ID NO: 44214 - protein, 10 aa, Artificial Sequence
  Description of Artificial Sequence: Synthetic epitope
SEASLDVLAK

SEQ ID NO: 44215 - protein, 10 aa, Artificial Sequence
  Description of Artificial Sequence: Synthetic epitope
SEASTATNSE

SEQ ID NO: 44216 - protein, 10 aa, Artificial Sequence
  Description of Artificial Sequence: Synthetic epitope
SEASTHSTTP

SEQ ID NO: 44217 - protein, 10 aa, Artificial Sequence
  Description of Artificial Sequence: Synthetic epitope
SEASTTSTTP

SEQ ID NO: 44218 - protein, 10 aa, Artificial Sequence
  Description of Artificial Sequence: Synthetic epitope
SEASVEDSNQ

SEQ ID NO: 44219 - protein, 10 aa, Artificial Sequence
  Description of Artificial Sequence: Synthetic epitope
SEASVSVADL

SEQ ID NO: 44220 - protein, 10 aa, Artificial Sequence
  Description of Artificial Sequence: Synthetic epitope
SEATHVVMEE

SEQ ID NO: 44221 - protein, 10 aa, Artificial Sequence
  Description of Artificial Sequence: Synthetic epitope
SEATKAGAAS

SEQ ID NO: 44222 - protein, 10 aa, Artificial Sequence
  Description of Artificial Sequence: Synthetic epitope
SEATNETGPL

SEQ ID NO: 44223 - protein, 10 aa, Artificial Sequence
  Description of Artificial Sequence: Synthetic epitope
SEATRGALSQ

SEQ ID NO: 44224 - protein, 10 aa, Artificial Sequence
  Description of Artificial Sequence: Synthetic epitope
SEAVDNVENV

SEQ ID NO: 44225 - protein, 10 aa, Artificial Sequence
  Description of Artificial Sequence: Synthetic epitope
SEAVQPVTPE

SEQ ID NO: 44226 - protein, 10 aa, Artificial Sequence
  Description of Artificial Sequence: Synthetic epitope
SEAVQTLLTW

SEQ ID NO: 44227 - protein, 10 aa, Artificial Sequence
  Description of Artificial Sequence: Synthetic epitope
SEAVTGADSS

SEQ ID NO: 44228 - protein, 10 aa, Artificial Sequence
  Description of Artificial Sequence: Synthetic epitope
SEDAVTDSSG

SEQ ID NO: 44229 - protein, 10 aa, Artificial Sequence
  Description of Artificial Sequence: Synthetic epitope
SEDDSDASSP

SEQ ID NO: 44230 - protein, 10 aa, Artificial Sequence
  Description of Artificial Sequence: Synthetic epitope
SEDDSSLSHL

SEQ ID NO: 44231 - protein, 10 aa, Artificial Sequence
  Description of Artificial Sequence: Synthetic epitope
SEDDTTESQN

SEQ ID NO: 44232 - protein, 10 aa, Artificial Sequence
  Description of Artificial Sequence: Synthetic epitope
SEDEGESRIL

SEQ ID NO: 44233 - protein, 10 aa, Artificial Sequence
  Description of Artificial Sequence: Synthetic epitope
SEDEKLSFEA

SEQ ID NO: 44234 - protein, 10 aa, Artificial Sequence
  Description of Artificial Sequence: Synthetic epitope
SEDERMELSK

SEQ ID NO: 44235 - protein, 10 aa, Artificial Sequence
  Description of Artificial Sequence: Synthetic epitope
SEDETSSKED

SEQ ID NO: 44236 - protein, 10 aa, Artificial Sequence
  Description of Artificial Sequence: Synthetic epitope
SEDIEELVEP

SEQ ID NO: 44237 - protein, 10 aa, Artificial Sequence
  Description of Artificial Sequence: Synthetic epitope
SEDISELQKN

SEQ ID NO: 44238 - protein, 10 aa, Artificial Sequence
  Description of Artificial Sequence: Synthetic epitope
SEDISETGYV

SEQ ID NO: 44239 - protein, 10 aa, Artificial Sequence
  Description of Artificial Sequence: Synthetic epitope
SEDQGERVRQ

SEQ ID NO: 44240 - protein, 10 aa, Artificial Sequence
  Description of Artificial Sequence: Synthetic epitope
SEDQQMASHE

SEQ ID NO: 44241 - protein, 10 aa, Artificial Sequence
  Description of Artificial Sequence: Synthetic epitope
SEDRKIGENY

SEQ ID NO: 44242 - protein, 10 aa, Artificial Sequence
  Description of Artificial Sequence: Synthetic epitope
SEDSAVVLSL

SEQ ID NO: 44243 - protein, 10 aa, Artificial Sequence
  Description of Artificial Sequence: Synthetic epitope
SEDSDLSSDD

SEQ ID NO: 44244 - protein, 10 aa, Artificial Sequence
  Description of Artificial Sequence: Synthetic epitope
SEDSRDQFEN

SEQ ID NO: 44245 - protein, 10 aa, Artificial Sequence
  Description of Artificial Sequence: Synthetic epitope
SEDSRESSIM

SEQ ID NO: 44246 - protein, 10 aa, Artificial Sequence
  Description of Artificial Sequence: Synthetic epitope
SEDSSTAENI

SEQ ID NO: 44247 - protein, 10 aa, Artificial Sequence
  Description of Artificial Sequence: Synthetic epitope
SEDSSVTQIY

SEQ ID NO: 44248 - protein, 10 aa, Artificial Sequence
  Description of Artificial Sequence: Synthetic epitope
SEDSTPDEPD

SEQ ID NO: 44249 - protein, 10 aa, Artificial Sequence
  Description of Artificial Sequence: Synthetic epitope
SEDTASLMSV

SEQ ID NO: 44250 - protein, 10 aa, Artificial Sequence
  Description of Artificial Sequence: Synthetic epitope
SEDTKKEVKQ

SEQ ID NO: 44251 - protein, 10 aa, Artificial Sequence
  Description of Artificial Sequence: Synthetic epitope
SEDVFETWGE

SEQ ID NO: 44252 - protein, 10 aa, Artificial Sequence
  Description of Artificial Sequence: Synthetic epitope
SEDVKRHSSA

SEQ ID NO: 44253 - protein, 10 aa, Artificial Sequence
  Description of Artificial Sequence: Synthetic epitope
SEEAEAGAAE

SEQ ID NO: 44254 - protein, 10 aa, Artificial Sequence
  Description of Artificial Sequence: Synthetic epitope
SEEAPDATKH

SEQ ID NO: 44255 - protein, 10 aa, Artificial Sequence
  Description of Artificial Sequence: Synthetic epitope
SEEASAELRH

SEQ ID NO: 44256 - protein, 10 aa, Artificial Sequence
  Description of Artificial Sequence: Synthetic epitope
SEEASEQSAE

SEQ ID NO: 44257 - protein, 10 aa, Artificial Sequence
  Description of Artificial Sequence: Synthetic epitope
SEEASREVAK

SEQ ID NO: 44258 - protein, 10 aa, Artificial Sequence
  Description of Artificial Sequence: Synthetic epitope
SEEDGSIYEM

SEQ ID NO: 44259 - protein, 10 aa, Artificial Sequence
  Description of Artificial Sequence: Synthetic epitope
SEEDKDRTEK

SEQ ID NO: 44260 - protein, 10 aa, Artificial Sequence
  Description of Artificial Sequence: Synthetic epitope
SEEDNTSAPS

SEQ ID NO: 44261 - protein, 10 aa, Artificial Sequence
  Description of Artificial Sequence: Synthetic epitope
SEEDRSKSAP

SEQ ID NO: 44262 - protein, 10 aa, Artificial Sequence
  Description of Artificial Sequence: Synthetic epitope
SEEDTSQNTA

SEQ ID NO: 44263 - protein, 10 aa, Artificial Sequence
  Description of Artificial Sequence: Synthetic epitope
SEEIEVEVPV

SEQ ID NO: 44264 - protein, 10 aa, Artificial Sequence
  Description of Artificial Sequence: Synthetic epitope
SEEIKVQPSQ

SEQ ID NO: 44265 - protein, 10 aa, Artificial Sequence
  Description of Artificial Sequence: Synthetic epitope
SEEISSDMSV

SEQ ID NO: 44266 - protein, 10 aa, Artificial Sequence
  Description of Artificial Sequence: Synthetic epitope
SEEITEEHSV

SEQ ID NO: 44267 - protein, 10 aa, Artificial Sequence
  Description of Artificial Sequence: Synthetic epitope
SEEKAKLLRE

SEQ ID NO: 44268 - protein, 10 aa, Artificial Sequence
  Description of Artificial Sequence: Synthetic epitope
SEEKLVSLPV

SEQ ID NO: 44269 - protein, 10 aa, Artificial Sequence
  Description of Artificial Sequence: Synthetic epitope
SEEKTVSLTV

SEQ ID NO: 44270 - protein, 10 aa, Artificial Sequence
  Description of Artificial Sequence: Synthetic epitope
SEELKSSQDE

SEQ ID NO: 44271 - protein, 10 aa, Artificial Sequence
  Description of Artificial Sequence: Synthetic epitope
SEELQHVQWR

SEQ ID NO: 44272 - protein, 10 aa, Artificial Sequence
  Description of Artificial Sequence: Synthetic epitope
SEELSNEGDS

SEQ ID NO: 44273 - protein, 10 aa, Artificial Sequence
  Description of Artificial Sequence: Synthetic epitope
SEELTAERIT

SEQ ID NO: 44274 - protein, 10 aa, Artificial Sequence
  Description of Artificial Sequence: Synthetic epitope
SEELTEAKTP

SEQ ID NO: 44275 - protein, 10 aa, Artificial Sequence
  Description of Artificial Sequence: Synthetic epitope
SEELVTRETG

SEQ ID NO: 44276 - protein, 10 aa, Artificial Sequence
  Description of Artificial Sequence: Synthetic epitope
SEEMNINSVV

SEQ ID NO: 44277 - protein, 10 aa, Artificial Sequence
  Description of Artificial Sequence: Synthetic epitope
SEEMTALEEN

SEQ ID NO: 44278 - protein, 10 aa, Artificial Sequence
  Description of Artificial Sequence: Synthetic epitope
SEENSSNQGK

SEQ ID NO: 44279 - protein, 10 aa, Artificial Sequence
  Description of Artificial Sequence: Synthetic epitope
SEEPGSITNS

SEQ ID NO: 44280 - protein, 10 aa, Artificial Sequence
  Description of Artificial Sequence: Synthetic epitope
SEEQDREDGK

SEQ ID NO: 44281 - protein, 10 aa, Artificial Sequence
  Description of Artificial Sequence: Synthetic epitope
SEEQETEAFV

SEQ ID NO: 44282 - protein, 10 aa, Artificial Sequence
  Description of Artificial Sequence: Synthetic epitope
SEEQIAERKR

SEQ ID NO: 44283 - protein, 10 aa, Artificial Sequence
  Description of Artificial Sequence: Synthetic epitope
SEEQLSRAYR

SEQ ID NO: 44284 - protein, 10 aa, Artificial Sequence
  Description of Artificial Sequence: Synthetic epitope
SEEQQKQQRR

SEQ ID NO: 44285 - protein, 10 aa, Artificial Sequence
  Description of Artificial Sequence: Synthetic epitope
SEEQRDRASD

SEQ ID NO: 44286 - protein, 10 aa, Artificial Sequence
  Description of Artificial Sequence: Synthetic epitope
SEESEKEKSP

SEQ ID NO: 44287 - protein, 10 aa, Artificial Sequence
  Description of Artificial Sequence: Synthetic epitope
SEESKQSGKK

SEQ ID NO: 44288 - protein, 10 aa, Artificial Sequence
  Description of Artificial Sequence: Synthetic epitope
SEESKTQTDA

SEQ ID NO: 44289 - protein, 10 aa, Artificial Sequence
  Description of Artificial Sequence: Synthetic epitope
SEESNEAEDQ

SEQ ID NO: 44290 - protein, 10 aa, Artificial Sequence
  Description of Artificial Sequence: Synthetic epitope
SEESRPRLSQ

SEQ ID NO: 44291 - protein, 10 aa, Artificial Sequence
  Description of Artificial Sequence: Synthetic epitope
SEESTKRTSH

SEQ ID NO: 44292 - protein, 10 aa, Artificial Sequence
  Description of Artificial Sequence: Synthetic epitope
SEETEASLAS

SEQ ID NO: 44293 - protein, 10 aa, Artificial Sequence
  Description of Artificial Sequence: Synthetic epitope
SEETKVALTK

SEQ ID NO: 44294 - protein, 10 aa, Artificial Sequence
  Description of Artificial Sequence: Synthetic epitope
SEETNARAPE

SEQ ID NO: 44295 - protein, 10 aa, Artificial Sequence
  Description of Artificial Sequence: Synthetic epitope
SEETPVVLQL

SEQ ID NO: 44296 - protein, 10 aa, Artificial Sequence
  Description of Artificial Sequence: Synthetic epitope
SEETTAGEQS

SEQ ID NO: 44297 - protein, 10 aa, Artificial Sequence
  Description of Artificial Sequence: Synthetic epitope
SEETVLRSDA

SEQ ID NO: 44298 - protein, 10 aa, Artificial Sequence
  Description of Artificial Sequence: Synthetic epitope
SEETVSESQF

SEQ ID NO: 44299 - protein, 10 aa, Artificial Sequence
  Description of Artificial Sequence: Synthetic epitope
SEEVALKQAE

SEQ ID NO: 44300 - protein, 10 aa, Artificial Sequence
  Description of Artificial Sequence: Synthetic epitope
SEEVKINDIT

SEQ ID NO: 44301 - protein, 10 aa, Artificial Sequence
  Description of Artificial Sequence: Synthetic epitope
SEEVKQVESG

SEQ ID NO: 44302 - protein, 10 aa, Artificial Sequence
  Description of Artificial Sequence: Synthetic epitope
SEEVSKQLLQ

SEQ ID NO: 44303 - protein, 10 aa, Artificial Sequence
  Description of Artificial Sequence: Synthetic epitope
SEEVTEIISQ

SEQ ID NO: 44304 - protein, 10 aa, Artificial Sequence
  Description of Artificial Sequence: Synthetic epitope
SEEYAVAIKP

SEQ ID NO: 44305 - protein, 10 aa, Artificial Sequence
  Description of Artificial Sequence: Synthetic epitope
SEFAAEAEGQ

SEQ ID NO: 44306 - protein, 10 aa, Artificial Sequence
  Description of Artificial Sequence: Synthetic epitope
SEFASSFGTA

SEQ ID NO: 44307 - protein, 10 aa, Artificial Sequence
  Description of Artificial Sequence: Synthetic epitope
SEFEAIKEHA

SEQ ID NO: 44308 - protein, 10 aa, Artificial Sequence
  Description of Artificial Sequence: Synthetic epitope
SEFEHRVNPL

SEQ ID NO: 44309 - protein, 10 aa, Artificial Sequence
  Description of Artificial Sequence: Synthetic epitope
SEFGKERMKE

SEQ ID NO: 44310 - protein, 10 aa, Artificial Sequence
  Description of Artificial Sequence: Synthetic epitope
SEFGSAPSSE

SEQ ID NO: 44311 - protein, 10 aa, Artificial Sequence
  Description of Artificial Sequence: Synthetic epitope
SEFINSKLTA

SEQ ID NO: 44312 - protein, 10 aa, Artificial Sequence
  Description of Artificial Sequence: Synthetic epitope
SEFQLEKIDY

SEQ ID NO: 44313 - protein, 10 aa, Artificial Sequence
  Description of Artificial Sequence: Synthetic epitope
SEFSLLKTSS

SEQ ID NO: 44314 - protein, 10 aa, Artificial Sequence
  Description of Artificial Sequence: Synthetic epitope
SEFYPRDSAK

SEQ ID NO: 44315 - protein, 10 aa, Artificial Sequence
  Description of Artificial Sequence: Synthetic epitope
SEGAKQAFAH

SEQ ID NO: 44316 - protein, 10 aa, Artificial Sequence
  Description of Artificial Sequence: Synthetic epitope
SEGAQLLQST

SEQ ID NO: 44317 - protein, 10 aa, Artificial Sequence
  Description of Artificial Sequence: Synthetic epitope
SEGEKIEGWE

SEQ ID NO: 44318 - protein, 10 aa, Artificial Sequence
  Description of Artificial Sequence: Synthetic epitope
SEGGLSAAPA

SEQ ID NO: 44319 - protein, 10 aa, Artificial Sequence
  Description of Artificial Sequence: Synthetic epitope
SEGKGSSERG

SEQ ID NO: 44320 - protein, 10 aa, Artificial Sequence
  Description of Artificial Sequence: Synthetic epitope
SEGKYSQAQR

SEQ ID NO: 44321 - protein, 10 aa, Artificial Sequence
  Description of Artificial Sequence: Synthetic epitope
SEGLARAQGL

SEQ ID NO: 44322 - protein, 10 aa, Artificial Sequence
  Description of Artificial Sequence: Synthetic epitope
SEGLSALKEE

SEQ ID NO: 44323 - protein, 10 aa, Artificial Sequence
  Description of Artificial Sequence: Synthetic epitope
SEGNNANYTE

SEQ ID NO: 44324 - protein, 10 aa, Artificial Sequence
  Description of Artificial Sequence: Synthetic epitope
SEGQSAAQSN

SEQ ID NO: 44325 - protein, 10 aa, Artificial Sequence
  Description of Artificial Sequence: Synthetic epitope
SEGQVTFTQL

SEQ ID NO: 44326 - protein, 10 aa, Artificial Sequence
  Description of Artificial Sequence: Synthetic epitope
SEGSDSGSDK

SEQ ID NO: 44327 - protein, 10 aa, Artificial Sequence
  Description of Artificial Sequence: Synthetic epitope
SEGSEAAVIP

SEQ ID NO: 44328 - protein, 10 aa, Artificial Sequence
  Description of Artificial Sequence: Synthetic epitope
SEGSEVSSEV

SEQ ID NO: 44329 - protein, 10 aa, Artificial Sequence
  Description of Artificial Sequence: Synthetic epitope
SEGSRSVLDL

SEQ ID NO: 44330 - protein, 10 aa, Artificial Sequence
  Description of Artificial Sequence: Synthetic epitope
SEGSSNTTEA

SEQ ID NO: 44331 - protein, 10 aa, Artificial Sequence
  Description of Artificial Sequence: Synthetic epitope
SEGSSQSLEE

SEQ ID NO: 44332 - protein, 10 aa, Artificial Sequence
  Description of Artificial Sequence: Synthetic epitope
SEGSVGKNKS

SEQ ID NO: 44333 - protein, 10 aa, Artificial Sequence
  Description of Artificial Sequence: Synthetic epitope
SEGSVLDSLR

SEQ ID NO: 44334 - protein, 10 aa, Artificial Sequence
  Description of Artificial Sequence: Synthetic epitope
SEGTMLKRLI

SEQ ID NO: 44335 - protein, 10 aa, Artificial Sequence
  Description of Artificial Sequence: Synthetic epitope
SEHETRLVAK

SEQ ID NO: 44336 - protein, 10 aa, Artificial Sequence
  Description of Artificial Sequence: Synthetic epitope
SEHSKGTSSI

SEQ ID NO: 44337 - protein, 10 aa, Artificial Sequence
  Description of Artificial Sequence: Synthetic epitope
SEHTQRYEAA

SEQ ID NO: 44338 - protein, 10 aa, Artificial Sequence
  Description of Artificial Sequence: Synthetic epitope
SEHYAASDRE

SEQ ID NO: 44339 - protein, 10 aa, Artificial Sequence
  Description of Artificial Sequence: Synthetic epitope
SEIAKESAKS

SEQ ID NO: 44340 - protein, 10 aa, Artificial Sequence
  Description of Artificial Sequence: Synthetic epitope
SEIDVRQEYP

SEQ ID NO: 44341 - protein, 10 aa, Artificial Sequence
  Description of Artificial Sequence: Synthetic epitope
SEIEAISTEI

SEQ ID NO: 44342 - protein, 10 aa, Artificial Sequence
  Description of Artificial Sequence: Synthetic epitope
SEIEDSTKQV

SEQ ID NO: 44343 - protein, 10 aa, Artificial Sequence
  Description of Artificial Sequence: Synthetic epitope
SEIELLTAGK

SEQ ID NO: 44344 - protein, 10 aa, Artificial Sequence
  Description of Artificial Sequence: Synthetic epitope
SEIHVEVERT

SEQ ID NO: 44345 - protein, 10 aa, Artificial Sequence
  Description of Artificial Sequence: Synthetic epitope
SEIHVSMATP

SEQ ID NO: 44346 - protein, 10 aa, Artificial Sequence
  Description of Artificial Sequence: Synthetic epitope
SEIISELVQT

SEQ ID NO: 44347 - protein, 10 aa, Artificial Sequence
  Description of Artificial Sequence: Synthetic epitope
SEIISVSDTQ

SEQ ID NO: 44348 - protein, 10 aa, Artificial Sequence
  Description of Artificial Sequence: Synthetic epitope
SEIKGKIRQR

SEQ ID NO: 44349 - protein, 10 aa, Artificial Sequence
  Description of Artificial Sequence: Synthetic epitope
SEIKISAADY

SEQ ID NO: 44350 - protein, 10 aa, Artificial Sequence
  Description of Artificial Sequence: Synthetic epitope
SEIKRQVVET

SEQ ID NO: 44351 - protein, 10 aa, Artificial Sequence
  Description of Artificial Sequence: Synthetic epitope
SEIKVETNIS

SEQ ID NO: 44352 - protein, 10 aa, Artificial Sequence
  Description of Artificial Sequence: Synthetic epitope
SEILDQAEFA

SEQ ID NO: 44353 - protein, 10 aa, Artificial Sequence
  Description of Artificial Sequence: Synthetic epitope
SEILIIQSLS

SEQ ID NO: 44354 - protein, 10 aa, Artificial Sequence
  Description of Artificial Sequence: Synthetic epitope
SEIMNNVHRI

SEQ ID NO: 44355 - protein, 10 aa, Artificial Sequence
  Description of Artificial Sequence: Synthetic epitope
SEINKAEEQY

SEQ ID NO: 44356 - protein, 10 aa, Artificial Sequence
  Description of Artificial Sequence: Synthetic epitope
SEIQITVSAE

SEQ ID NO: 44357 - protein, 10 aa, Artificial Sequence
  Description of Artificial Sequence: Synthetic epitope
SEIRGSVQAK

SEQ ID NO: 44358 - protein, 10 aa, Artificial Sequence
  Description of Artificial Sequence: Synthetic epitope
SEIRTISAYK

SEQ ID NO: 44359 - protein, 10 aa, Artificial Sequence
  Description of Artificial Sequence: Synthetic epitope
SEISDMQDTE

SEQ ID NO: 44360 - protein, 10 aa, Artificial Sequence
  Description of Artificial Sequence: Synthetic epitope
SEISKALRRE

SEQ ID NO: 44361 - protein, 10 aa, Artificial Sequence
  Description of Artificial Sequence: Synthetic epitope
SEISLAVERA

SEQ ID NO: 44362 - protein, 10 aa, Artificial Sequence
  Description of Artificial Sequence: Synthetic epitope
SEISNSEKHV

SEQ ID NO: 44363 - protein, 10 aa, Artificial Sequence
  Description of Artificial Sequence: Synthetic epitope
SEISQKLPGE

SEQ ID NO: 44364 - protein, 10 aa, Artificial Sequence
  Description of Artificial Sequence: Synthetic epitope
SEISQVRLYT

SEQ ID NO: 44365 - protein, 10 aa, Artificial Sequence
  Description of Artificial Sequence: Synthetic epitope
SEITGGPINE

SEQ ID NO: 44366 - protein, 10 aa, Artificial Sequence
  Description of Artificial Sequence: Synthetic epitope
SEITKRAQDI

SEQ ID NO: 44367 - protein, 10 aa, Artificial Sequence
  Description of Artificial Sequence: Synthetic epitope
SEITYLGQPD

SEQ ID NO: 44368 - protein, 10 aa, Artificial Sequence
  Description of Artificial Sequence: Synthetic epitope
SEKAANSQVG

SEQ ID NO: 44369 - protein, 10 aa, Artificial Sequence
  Description of Artificial Sequence: Synthetic epitope
SEKAINRNYL

SEQ ID NO: 44370 - protein, 10 aa, Artificial Sequence
  Description of Artificial Sequence: Synthetic epitope
SEKAKAALKR

SEQ ID NO: 44371 - protein, 10 aa, Artificial Sequence
  Description of Artificial Sequence: Synthetic epitope
SEKASSTSPV

SEQ ID NO: 44372 - protein, 10 aa, Artificial Sequence
  Description of Artificial Sequence: Synthetic epitope
SEKDTLKTSN

SEQ ID NO: 44373 - protein, 10 aa, Artificial Sequence
  Description of Artificial Sequence: Synthetic epitope
SEKDVTSAKA

SEQ ID NO: 44374 - protein, 10 aa, Artificial Sequence
  Description of Artificial Sequence: Synthetic epitope
SEKEAALTKI

SEQ ID NO: 44375 - protein, 10 aa, Artificial Sequence
  Description of Artificial Sequence: Synthetic epitope
SEKEAAPDAG

SEQ ID NO: 44376 - protein, 10 aa, Artificial Sequence
  Description of Artificial Sequence: Synthetic epitope
SEKEDLNITK

SEQ ID NO: 44377 - protein, 10 aa, Artificial Sequence
  Description of Artificial Sequence: Synthetic epitope
SEKEHPTTKD

SEQ ID NO: 44378 - protein, 10 aa, Artificial Sequence
  Description of Artificial Sequence: Synthetic epitope
SEKEKAIEVE

SEQ ID NO: 44379 - protein, 10 aa, Artificial Sequence
  Description of Artificial Sequence: Synthetic epitope
SEKEKKISEE

SEQ ID NO: 44380 - protein, 10 aa, Artificial Sequence
  Description of Artificial Sequence: Synthetic epitope
SEKESQAIQS

SEQ ID NO: 44381 - protein, 10 aa, Artificial Sequence
  Description of Artificial Sequence: Synthetic epitope
SEKGQSGKKM

SEQ ID NO: 44382 - protein, 10 aa, Artificial Sequence
  Description of Artificial Sequence: Synthetic epitope
SEKGSLTSEE

SEQ ID NO: 44383 - protein, 10 aa, Artificial Sequence
  Description of Artificial Sequence: Synthetic epitope
SEKGTDKKLE

SEQ ID NO: 44384 - protein, 10 aa, Artificial Sequence
  Description of Artificial Sequence: Synthetic epitope
SEKHQGKAAT

SEQ ID NO: 44385 - protein, 10 aa, Artificial Sequence
  Description of Artificial Sequence: Synthetic epitope
SEKIAQNQIH

SEQ ID NO: 44386 - protein, 10 aa, Artificial Sequence
  Description of Artificial Sequence: Synthetic epitope
SEKIAVEEIK

SEQ ID NO: 44387 - protein, 10 aa, Artificial Sequence
  Description of Artificial Sequence: Synthetic epitope
SEKISKSEET

SEQ ID NO: 44388 - protein, 10 aa, Artificial Sequence
  Description of Artificial Sequence: Synthetic epitope
SEKKAITRDM

SEQ ID NO: 44389 - protein, 10 aa, Artificial Sequence
  Description of Artificial Sequence: Synthetic epitope
SEKKDSKESS

SEQ ID NO: 44390 - protein, 10 aa, Artificial Sequence
  Description of Artificial Sequence: Synthetic epitope
SEKKSNHHKD

SEQ ID NO: 44391 - protein, 10 aa, Artificial Sequence
  Description of Artificial Sequence: Synthetic epitope
SEKKSNIPDL

SEQ ID NO: 44392 - protein, 10 aa, Artificial Sequence
  Description of Artificial Sequence: Synthetic epitope
SEKLAQSKET

SEQ ID NO: 44393 - protein, 10 aa, Artificial Sequence
  Description of Artificial Sequence: Synthetic epitope
SEKLETLRNQ

SEQ ID NO: 44394 - protein, 10 aa, Artificial Sequence
  Description of Artificial Sequence: Synthetic epitope
SEKLKGSHSS

SEQ ID NO: 44395 - protein, 10 aa, Artificial Sequence
  Description of Artificial Sequence: Synthetic epitope
SEKLKTQQMN

SEQ ID NO: 44396 - protein, 10 aa, Artificial Sequence
  Description of Artificial Sequence: Synthetic epitope
SEKLTASEQA

SEQ ID NO: 44397 - protein, 10 aa, Artificial Sequence
  Description of Artificial Sequence: Synthetic epitope
SEKLTTAMNR

SEQ ID NO: 44398 - protein, 10 aa, Artificial Sequence
  Description of Artificial Sequence: Synthetic epitope
SEKNKHKEKQ

SEQ ID NO: 44399 - protein, 10 aa, Artificial Sequence
  Description of Artificial Sequence: Synthetic epitope
SEKPASSTEE

SEQ ID NO: 44400 - protein, 10 aa, Artificial Sequence
  Description of Artificial Sequence: Synthetic epitope
SEKPVHHSKV

SEQ ID NO: 44401 - protein, 10 aa, Artificial Sequence
  Description of Artificial Sequence: Synthetic epitope
SEKQEAKSGI

SEQ ID NO: 44402 - protein, 10 aa, Artificial Sequence
  Description of Artificial Sequence: Synthetic epitope
SEKQQEELRT

SEQ ID NO: 44403 - protein, 10 aa, Artificial Sequence
  Description of Artificial Sequence: Synthetic epitope
SEKRQPPKEQ

SEQ ID NO: 44404 - protein, 10 aa, Artificial Sequence
  Description of Artificial Sequence: Synthetic epitope
SEKRSLAESG

SEQ ID NO: 44405 - protein, 10 aa, Artificial Sequence
  Description of Artificial Sequence: Synthetic epitope
SEKSERSLAL

SEQ ID NO: 44406 - protein, 10 aa, Artificial Sequence
  Description of Artificial Sequence: Synthetic epitope
SEKSLDSELE

SEQ ID NO: 44407 - protein, 10 aa, Artificial Sequence
  Description of Artificial Sequence: Synthetic epitope
SEKSSAASQH

SEQ ID NO: 44408 - protein, 10 aa, Artificial Sequence
  Description of Artificial Sequence: Synthetic epitope
SEKSVEERDS

SEQ ID NO: 44409 - protein, 10 aa, Artificial Sequence
  Description of Artificial Sequence: Synthetic epitope
SEKTGKTQSK

SEQ ID NO: 44410 - protein, 10 aa, Artificial Sequence
  Description of Artificial Sequence: Synthetic epitope
SEKVEAYSPY

SEQ ID NO: 44411 - protein, 10 aa, Artificial Sequence
  Description of Artificial Sequence: Synthetic epitope
SEKVRSTNLN

SEQ ID NO: 44412 - protein, 10 aa, Artificial Sequence
  Description of Artificial Sequence: Synthetic epitope
SELAAETDLP

SEQ ID NO: 44413 - protein, 10 aa, Artificial Sequence
  Description of Artificial Sequence: Synthetic epitope
SELAKRKVKK

SEQ ID NO: 44414 - protein, 10 aa, Artificial Sequence
  Description of Artificial Sequence: Synthetic epitope
SELALTLNAW

SEQ ID NO: 44415 - protein, 10 aa, Artificial Sequence
  Description of Artificial Sequence: Synthetic epitope
SELDEHTENK

SEQ ID NO: 44416 - protein, 10 aa, Artificial Sequence
  Description of Artificial Sequence: Synthetic epitope
SELDKSSAHS

SEQ ID NO: 44417 - protein, 10 aa, Artificial Sequence
  Description of Artificial Sequence: Synthetic epitope
SELDLGAERD

SEQ ID NO: 44418 - protein, 10 aa, Artificial Sequence
  Description of Artificial Sequence: Synthetic epitope
SELDMTSEVL

SEQ ID NO: 44419 - protein, 10 aa, Artificial Sequence
  Description of Artificial Sequence: Synthetic epitope
SELEDTTEKT

SEQ ID NO: 44420 - protein, 10 aa, Artificial Sequence
  Description of Artificial Sequence: Synthetic epitope
SELELTSVVE

SEQ ID NO: 44421 - protein, 10 aa, Artificial Sequence
  Description of Artificial Sequence: Synthetic epitope
SELESSNLES

SEQ ID NO: 44422 - protein, 10 aa, Artificial Sequence
  Description of Artificial Sequence: Synthetic epitope
SELETVIASA

SEQ ID NO: 44423 - protein, 10 aa, Artificial Sequence
  Description of Artificial Sequence: Synthetic epitope
SELFRMNKFS

SEQ ID NO: 44424 - protein, 10 aa, Artificial Sequence
  Description of Artificial Sequence: Synthetic epitope
SELFSQKTKA

SEQ ID NO: 44425 - protein, 10 aa, Artificial Sequence
  Description of Artificial Sequence: Synthetic epitope
SELHSSLTSE

SEQ ID NO: 44426 - protein, 10 aa, Artificial Sequence
  Description of Artificial Sequence: Synthetic epitope
SELILLQKVQ

SEQ ID NO: 44427 - protein, 10 aa, Artificial Sequence
  Description of Artificial Sequence: Synthetic epitope
SELISSVSQQ

SEQ ID NO: 44428 - protein, 10 aa, Artificial Sequence
  Description of Artificial Sequence: Synthetic epitope
SELKEELKKR

SEQ ID NO: 44429 - protein, 10 aa, Artificial Sequence
  Description of Artificial Sequence: Synthetic epitope
SELKEMSEYY

SEQ ID NO: 44430 - protein, 10 aa, Artificial Sequence
  Description of Artificial Sequence: Synthetic epitope
SELKIGQIDQ

SEQ ID NO: 44431 - protein, 10 aa, Artificial Sequence
  Description of Artificial Sequence: Synthetic epitope
SELKNRMEYA

SEQ ID NO: 44432 - protein, 10 aa, Artificial Sequence
  Description of Artificial Sequence: Synthetic epitope
SELKRQRQTE

SEQ ID NO: 44433 - protein, 10 aa, Artificial Sequence
  Description of Artificial Sequence: Synthetic epitope
SELKSSLKPP

SEQ ID NO: 44434 - protein, 10 aa, Artificial Sequence
  Description of Artificial Sequence: Synthetic epitope
SELKYSDDLS

SEQ ID NO: 44435 - protein, 10 aa, Artificial Sequence
  Description of Artificial Sequence: Synthetic epitope
SELLAVSSTT

SEQ ID NO: 44436 - protein, 10 aa, Artificial Sequence
  Description of Artificial Sequence: Synthetic epitope
SELLRSAQPA

SEQ ID NO: 44437 - protein, 10 aa, Artificial Sequence
  Description of Artificial Sequence: Synthetic epitope
SELMVLTDLL

SEQ ID NO: 44438 - protein, 10 aa, Artificial Sequence
  Description of Artificial Sequence: Synthetic epitope
SELPTSTTLK

SEQ ID NO: 44439 - protein, 10 aa, Artificial Sequence
  Description of Artificial Sequence: Synthetic epitope
SELQADVDTK

SEQ ID NO: 44440 - protein, 10 aa, Artificial Sequence
  Description of Artificial Sequence: Synthetic epitope
SELQLTDPVS

SEQ ID NO: 44441 - protein, 10 aa, Artificial Sequence
  Description of Artificial Sequence: Synthetic epitope
SELQVEQTSL

SEQ ID NO: 44442 - protein, 10 aa, Artificial Sequence
  Description of Artificial Sequence: Synthetic epitope
SELREHRAAQ

SEQ ID NO: 44443 - protein, 10 aa, Artificial Sequence
  Description of Artificial Sequence: Synthetic epitope
SELRETPSSL

SEQ ID NO: 44444 - protein, 10 aa, Artificial Sequence
  Description of Artificial Sequence: Synthetic epitope
SELREVSLAE

SEQ ID NO: 44445 - protein, 10 aa, Artificial Sequence
  Description of Artificial Sequence: Synthetic epitope
SELREVSLAE

SEQ ID NO: 44446 - protein, 10 aa, Artificial Sequence
  Description of Artificial Sequence: Synthetic epitope
SELRQATVAM

SEQ ID NO: 44447 - protein, 10 aa, Artificial Sequence
  Description of Artificial Sequence: Synthetic epitope
SELSERIESF

SEQ ID NO: 44448 - protein, 10 aa, Artificial Sequence
  Description of Artificial Sequence: Synthetic epitope
SELSGSVAQT

SEQ ID NO: 44449 - protein, 10 aa, Artificial Sequence
  Description of Artificial Sequence: Synthetic epitope
SELSKVQISE

SEQ ID NO: 44450 - protein, 10 aa, Artificial Sequence
  Description of Artificial Sequence: Synthetic epitope
SELSLLQNLR

SEQ ID NO: 44451 - protein, 10 aa, Artificial Sequence
  Description of Artificial Sequence: Synthetic epitope
SELSLQLRLP

SEQ ID NO: 44452 - protein, 10 aa, Artificial Sequence
  Description of Artificial Sequence: Synthetic epitope
SELSSAALQA

SEQ ID NO: 44453 - protein, 10 aa, Artificial Sequence
  Description of Artificial Sequence: Synthetic epitope
SELSTMTTEP

SEQ ID NO: 44454 - protein, 10 aa, Artificial Sequence
  Description of Artificial Sequence: Synthetic epitope
SELSTSQAET

SEQ ID NO: 44455 - protein, 10 aa, Artificial Sequence
  Description of Artificial Sequence: Synthetic epitope
SELSTSTSEG

SEQ ID NO: 44456 - protein, 10 aa, Artificial Sequence
  Description of Artificial Sequence: Synthetic epitope
SELSVEEAQD

SEQ ID NO: 44457 - protein, 10 aa, Artificial Sequence
  Description of Artificial Sequence: Synthetic epitope
SELSVQHADS

SEQ ID NO: 44458 - protein, 10 aa, Artificial Sequence
  Description of Artificial Sequence: Synthetic epitope
SELTAEKLGF

SEQ ID NO: 44459 - protein, 10 aa, Artificial Sequence
  Description of Artificial Sequence: Synthetic epitope
SELTQEMNLV

SEQ ID NO: 44460 - protein, 10 aa, Artificial Sequence
  Description of Artificial Sequence: Synthetic epitope
SELVQLQEVA

SEQ ID NO: 44461 - protein, 10 aa, Artificial Sequence
  Description of Artificial Sequence: Synthetic epitope
SELVRYDARV

SEQ ID NO: 44462 - protein, 10 aa, Artificial Sequence
  Description of Artificial Sequence: Synthetic epitope
SELVSISELA

SEQ ID NO: 44463 - protein, 10 aa, Artificial Sequence
  Description of Artificial Sequence: Synthetic epitope
SEMDRQSHPV

SEQ ID NO: 44464 - protein, 10 aa, Artificial Sequence
  Description of Artificial Sequence: Synthetic epitope
SEMDSVLMKI

SEQ ID NO: 44465 - protein, 10 aa, Artificial Sequence
  Description of Artificial Sequence: Synthetic epitope
SEMEANFKNL

SEQ ID NO: 44466 - protein, 10 aa, Artificial Sequence
  Description of Artificial Sequence: Synthetic epitope
SEMEKAVESV

SEQ ID NO: 44467 - protein, 10 aa, Artificial Sequence
  Description of Artificial Sequence: Synthetic epitope
SEMGSEKEQS

SEQ ID NO: 44468 - protein, 10 aa, Artificial Sequence
  Description of Artificial Sequence: Synthetic epitope
SEMKQSSASD

SEQ ID NO: 44469 - protein, 10 aa, Artificial Sequence
  Description of Artificial Sequence: Synthetic epitope
SEMKRAYKSY

SEQ ID NO: 44470 - protein, 10 aa, Artificial Sequence
  Description of Artificial Sequence: Synthetic epitope
SEMKRTLIKL

SEQ ID NO: 44471 - protein, 10 aa, Artificial Sequence
  Description of Artificial Sequence: Synthetic epitope
SEMLMLSPGS

SEQ ID NO: 44472 - protein, 10 aa, Artificial Sequence
  Description of Artificial Sequence: Synthetic epitope
SEMLMSSGYA

SEQ ID NO: 44473 - protein, 10 aa, Artificial Sequence
  Description of Artificial Sequence: Synthetic epitope
SEMLNSVNKN

SEQ ID NO: 44474 - protein, 10 aa, Artificial Sequence
  Description of Artificial Sequence: Synthetic epitope
SEMNRLFSGK

SEQ ID NO: 44475 - protein, 10 aa, Artificial Sequence
  Description of Artificial Sequence: Synthetic epitope
SEMNSDSEIY

SEQ ID NO: 44476 - protein, 10 aa, Artificial Sequence
  Description of Artificial Sequence: Synthetic epitope
SEMQMKAGVT

SEQ ID NO: 44477 - protein, 10 aa, Artificial Sequence
  Description of Artificial Sequence: Synthetic epitope
SEMRNLATQR

SEQ ID NO: 44478 - protein, 10 aa, Artificial Sequence
  Description of Artificial Sequence: Synthetic epitope
SEMSSVGSKG

SEQ ID NO: 44479 - protein, 10 aa, Artificial Sequence
  Description of Artificial Sequence: Synthetic epitope
SEMTESSELA

SEQ ID NO: 44480 - protein, 10 aa, Artificial Sequence
  Description of Artificial Sequence: Synthetic epitope
SEMVAVVTDK

SEQ ID NO: 44481 - protein, 10 aa, Artificial Sequence
  Description of Artificial Sequence: Synthetic epitope
SEMVNGATEQ

SEQ ID NO: 44482 - protein, 10 aa, Artificial Sequence
  Description of Artificial Sequence: Synthetic epitope
SENAVRIEPN

SEQ ID NO: 44483 - protein, 10 aa, Artificial Sequence
  Description of Artificial Sequence: Synthetic epitope
SENDASSENE

SEQ ID NO: 44484 - protein, 10 aa, Artificial Sequence
  Description of Artificial Sequence: Synthetic epitope
SENEFASEAE

SEQ ID NO: 44485 - protein, 10 aa, Artificial Sequence
  Description of Artificial Sequence: Synthetic epitope
SENESTHSGN

SEQ ID NO: 44486 - protein, 10 aa, Artificial Sequence
  Description of Artificial Sequence: Synthetic epitope
SENEYIMKAI

SEQ ID NO: 44487 - protein, 10 aa, Artificial Sequence
  Description of Artificial Sequence: Synthetic epitope
SENFKTSSLA

SEQ ID NO: 44488 - protein, 10 aa, Artificial Sequence
  Description of Artificial Sequence: Synthetic epitope
SENKPVKTEP

SEQ ID NO: 44489 - protein, 10 aa, Artificial Sequence
  Description of Artificial Sequence: Synthetic epitope
SENLAMAVII

SEQ ID NO: 44490 - protein, 10 aa, Artificial Sequence
  Description of Artificial Sequence: Synthetic epitope
SENLNAKNNT

SEQ ID NO: 44491 - protein, 10 aa, Artificial Sequence
  Description of Artificial Sequence: Synthetic epitope
SENLQSLMEK

SEQ ID NO: 44492 - protein, 10 aa, Artificial Sequence
  Description of Artificial Sequence: Synthetic epitope
SENRSREELG

SEQ ID NO: 44493 - protein, 10 aa, Artificial Sequence
  Description of Artificial Sequence: Synthetic epitope
SENSEESRVE

SEQ ID NO: 44494 - protein, 10 aa, Artificial Sequence
  Description of Artificial Sequence: Synthetic epitope
SENSSEIKKG

SEQ ID NO: 44495 - protein, 10 aa, Artificial Sequence
  Description of Artificial Sequence: Synthetic epitope
SENSSKATDE

SEQ ID NO: 44496 - protein, 10 aa, Artificial Sequence
  Description of Artificial Sequence: Synthetic epitope
SENSTMLKIN

SEQ ID NO: 44497 - protein, 10 aa, Artificial Sequence
  Description of Artificial Sequence: Synthetic epitope
SENSVTKNPL

SEQ ID NO: 44498 - protein, 10 aa, Artificial Sequence
  Description of Artificial Sequence: Synthetic epitope
SENTMRNKSR

SEQ ID NO: 44499 - protein, 10 aa, Artificial Sequence
  Description of Artificial Sequence: Synthetic epitope
SENTNLTTQE

SEQ ID NO: 44500 - protein, 10 aa, Artificial Sequence
  Description of Artificial Sequence: Synthetic epitope
SENYIHVHFL

SEQ ID NO: 44501 - protein, 10 aa, Artificial Sequence
  Description of Artificial Sequence: Synthetic epitope
SEPAEIQSEE

SEQ ID NO: 44502 - protein, 10 aa, Artificial Sequence
  Description of Artificial Sequence: Synthetic epitope
SEPAVTVSEQ

SEQ ID NO: 44503 - protein, 10 aa, Artificial Sequence
  Description of Artificial Sequence: Synthetic epitope
SEPDLASYSV

SEQ ID NO: 44504 - protein, 10 aa, Artificial Sequence
  Description of Artificial Sequence: Synthetic epitope
SEPKELAGDP

SEQ ID NO: 44505 - protein, 10 aa, Artificial Sequence
  Description of Artificial Sequence: Synthetic epitope
SEPLTTERVR

SEQ ID NO: 44506 - protein, 10 aa, Artificial Sequence
  Description of Artificial Sequence: Synthetic epitope
SEPMLSHTVR

SEQ ID NO: 44507 - protein, 10 aa, Artificial Sequence
  Description of Artificial Sequence: Synthetic epitope
SEPNLTKSQS

SEQ ID NO: 44508 - protein, 10 aa, Artificial Sequence
  Description of Artificial Sequence: Synthetic epitope
SEPPVEMITP

SEQ ID NO: 44509 - protein, 10 aa, Artificial Sequence
  Description of Artificial Sequence: Synthetic epitope
SEPQAGVNLL

SEQ ID NO: 44510 - protein, 10 aa, Artificial Sequence
  Description of Artificial Sequence: Synthetic epitope
SEPQTSSQDD

SEQ ID NO: 44511 - protein, 10 aa, Artificial Sequence
  Description of Artificial Sequence: Synthetic epitope
SEPSGTSSQH

SEQ ID NO: 44512 - protein, 10 aa, Artificial Sequence
  Description of Artificial Sequence: Synthetic epitope
SEPSMNSDMG

SEQ ID NO: 44513 - protein, 10 aa, Artificial Sequence
  Description of Artificial Sequence: Synthetic epitope
SEPSRTREAG

SEQ ID NO: 44514 - protein, 10 aa, Artificial Sequence
  Description of Artificial Sequence: Synthetic epitope
SEPSTALTKP

SEQ ID NO: 44515 - protein, 10 aa, Artificial Sequence
  Description of Artificial Sequence: Synthetic epitope
SEPSVSVQES

SEQ ID NO: 44516 - protein, 10 aa, Artificial Sequence
  Description of Artificial Sequence: Synthetic epitope
SEPTLLKKAN

SEQ ID NO: 44517 - protein, 10 aa, Artificial Sequence
  Description of Artificial Sequence: Synthetic epitope
SEPVSMPPKM

SEQ ID NO: 44518 - protein, 10 aa, Artificial Sequence
  Description of Artificial Sequence: Synthetic epitope
SEPYVTSLLK

SEQ ID NO: 44519 - protein, 10 aa, Artificial Sequence
  Description of Artificial Sequence: Synthetic epitope
SEQASLLDLD

SEQ ID NO: 44520 - protein, 10 aa, Artificial Sequence
  Description of Artificial Sequence: Synthetic epitope
SEQESEGSKA

SEQ ID NO: 44521 - protein, 10 aa, Artificial Sequence
  Description of Artificial Sequence: Synthetic epitope
SEQGGLEGSG

SEQ ID NO: 44522 - protein, 10 aa, Artificial Sequence
  Description of Artificial Sequence: Synthetic epitope
SEQGHRQAQT

SEQ ID NO: 44523 - protein, 10 aa, Artificial Sequence
  Description of Artificial Sequence: Synthetic epitope
SEQGSIHLEP

SEQ ID NO: 44524 - protein, 10 aa, Artificial Sequence
  Description of Artificial Sequence: Synthetic epitope
SEQGSTDNES

SEQ ID NO: 44525 - protein, 10 aa, Artificial Sequence
  Description of Artificial Sequence: Synthetic epitope
SEQGSTSQEQ

SEQ ID NO: 44526 - protein, 10 aa, Artificial Sequence
  Description of Artificial Sequence: Synthetic epitope
SEQGVVTITY

SEQ ID NO: 44527 - protein, 10 aa, Artificial Sequence
  Description of Artificial Sequence: Synthetic epitope
SEQISQERYQ

SEQ ID NO: 44528 - protein, 10 aa, Artificial Sequence
  Description of Artificial Sequence: Synthetic epitope
SEQKDQAANE

SEQ ID NO: 44529 - protein, 10 aa, Artificial Sequence
  Description of Artificial Sequence: Synthetic epitope
SEQKRPIDVE

SEQ ID NO: 44530 - protein, 10 aa, Artificial Sequence
  Description of Artificial Sequence: Synthetic epitope
SEQLSLELHQ

SEQ ID NO: 44531 - protein, 10 aa, Artificial Sequence
  Description of Artificial Sequence: Synthetic epitope
SEQNHQESEL

SEQ ID NO: 44532 - protein, 10 aa, Artificial Sequence
  Description of Artificial Sequence: Synthetic epitope
SEQQAKSLLK

SEQ ID NO: 44533 - protein, 10 aa, Artificial Sequence
  Description of Artificial Sequence: Synthetic epitope
SEQQLEGTES

SEQ ID NO: 44534 - protein, 10 aa, Artificial Sequence
  Description of Artificial Sequence: Synthetic epitope
SEQQSNQVEK

SEQ ID NO: 44535 - protein, 10 aa, Artificial Sequence
  Description of Artificial Sequence: Synthetic epitope
SEQRQVDAEV

SEQ ID NO: 44536 - protein, 10 aa, Artificial Sequence
  Description of Artificial Sequence: Synthetic epitope
SEQRTKRQPK

SEQ ID NO: 44537 - protein, 10 aa, Artificial Sequence
  Description of Artificial Sequence: Synthetic epitope
SEQSARARTQ

SEQ ID NO: 44538 - protein, 10 aa, Artificial Sequence
  Description of Artificial Sequence: Synthetic epitope
SEQSLSKIKQ

SEQ ID NO: 44539 - protein, 10 aa, Artificial Sequence
  Description of Artificial Sequence: Synthetic epitope
SEQSSLSTDD

SEQ ID NO: 44540 - protein, 10 aa, Artificial Sequence
  Description of Artificial Sequence: Synthetic epitope
SEQTNQLRNK

SEQ ID NO: 44541 - protein, 10 aa, Artificial Sequence
  Description of Artificial Sequence: Synthetic epitope
SEQTSLKTVS

SEQ ID NO: 44542 - protein, 10 aa, Artificial Sequence
  Description of Artificial Sequence: Synthetic epitope
SERAKIDASE

SEQ ID NO: 44543 - protein, 10 aa, Artificial Sequence
  Description of Artificial Sequence: Synthetic epitope
SEREAPSIEQ

SEQ ID NO: 44544 - protein, 10 aa, Artificial Sequence
  Description of Artificial Sequence: Synthetic epitope
SERETEQTPA

SEQ ID NO: 44545 - protein, 10 aa, Artificial Sequence
  Description of Artificial Sequence: Synthetic epitope
SERIRGKRRA

SEQ ID NO: 44546 - protein, 10 aa, Artificial Sequence
  Description of Artificial Sequence: Synthetic epitope
SERKSRTSLT

SEQ ID NO: 44547 - protein, 10 aa, Artificial Sequence
  Description of Artificial Sequence: Synthetic epitope
SERKSSAEDV

SEQ ID NO: 44548 - protein, 10 aa, Artificial Sequence
  Description of Artificial Sequence: Synthetic epitope
SERLGAHSSR

SEQ ID NO: 44549 - protein, 10 aa, Artificial Sequence
  Description of Artificial Sequence: Synthetic epitope
SERPKESMYS

SEQ ID NO: 44550 - protein, 10 aa, Artificial Sequence
  Description of Artificial Sequence: Synthetic epitope
SERQKASNLK

SEQ ID NO: 44551 - protein, 10 aa, Artificial Sequence
  Description of Artificial Sequence: Synthetic epitope
SERQRNLQEL

SEQ ID NO: 44552 - protein, 10 aa, Artificial Sequence
  Description of Artificial Sequence: Synthetic epitope
SERQSGSQLE

SEQ ID NO: 44553 - protein, 10 aa, Artificial Sequence
  Description of Artificial Sequence: Synthetic epitope
SERSAVDPSS

SEQ ID NO: 44554 - protein, 10 aa, Artificial Sequence
  Description of Artificial Sequence: Synthetic epitope
SERSHARNAH

SEQ ID NO: 44555 - protein, 10 aa, Artificial Sequence
  Description of Artificial Sequence: Synthetic epitope
SERSNALWQA

SEQ ID NO: 44556 - protein, 10 aa, Artificial Sequence
  Description of Artificial Sequence: Synthetic epitope
SERTDGRYSK

SEQ ID NO: 44557 - protein, 10 aa, Artificial Sequence
  Description of Artificial Sequence: Synthetic epitope
SERTETLKSG

SEQ ID NO: 44558 - protein, 10 aa, Artificial Sequence
  Description of Artificial Sequence: Synthetic epitope
SERTNSSDSE

SEQ ID NO: 44559 - protein, 10 aa, Artificial Sequence
  Description of Artificial Sequence: Synthetic epitope
SERTTQSMQD

SEQ ID NO: 44560 - protein, 10 aa, Artificial Sequence
  Description of Artificial Sequence: Synthetic epitope
SERVEVVSPL

SEQ ID NO: 44561 - protein, 10 aa, Artificial Sequence
  Description of Artificial Sequence: Synthetic epitope
SERVFGSVGK

SEQ ID NO: 44562 - protein, 10 aa, Artificial Sequence
  Description of Artificial Sequence: Synthetic epitope
SERVSNLEEL

SEQ ID NO: 44563 - protein, 10 aa, Artificial Sequence
  Description of Artificial Sequence: Synthetic epitope
SERYARLERA

SEQ ID NO: 44564 - protein, 10 aa, Artificial Sequence
  Description of Artificial Sequence: Synthetic epitope
SERYARLERA

SEQ ID NO: 44565 - protein, 10 aa, Artificial Sequence
  Description of Artificial Sequence: Synthetic epitope
SESAGLATAS

SEQ ID NO: 44566 - protein, 10 aa, Artificial Sequence
  Description of Artificial Sequence: Synthetic epitope
SESAPRLRSA

SEQ ID NO: 44567 - protein, 10 aa, Artificial Sequence
  Description of Artificial Sequence: Synthetic epitope
SESASELELV

SEQ ID NO: 44568 - protein, 10 aa, Artificial Sequence
  Description of Artificial Sequence: Synthetic epitope
SESASKQTGL

SEQ ID NO: 44569 - protein, 10 aa, Artificial Sequence
  Description of Artificial Sequence: Synthetic epitope
SESDDSSLDM

SEQ ID NO: 44570 - protein, 10 aa, Artificial Sequence
  Description of Artificial Sequence: Synthetic epitope
SESDIQEDNK

SEQ ID NO: 44571 - protein, 10 aa, Artificial Sequence
  Description of Artificial Sequence: Synthetic epitope
SESDLDNDNM

SEQ ID NO: 44572 - protein, 10 aa, Artificial Sequence
  Description of Artificial Sequence: Synthetic epitope
SESDRASLPV

SEQ ID NO: 44573 - protein, 10 aa, Artificial Sequence
  Description of Artificial Sequence: Synthetic epitope
SESDTEGSEE

SEQ ID NO: 44574 - protein, 10 aa, Artificial Sequence
  Description of Artificial Sequence: Synthetic epitope
SESEAKVDGE

SEQ ID NO: 44575 - protein, 10 aa, Artificial Sequence
  Description of Artificial Sequence: Synthetic epitope
SESEDEQRPR

SEQ ID NO: 44576 - protein, 10 aa, Artificial Sequence
  Description of Artificial Sequence: Synthetic epitope
SESEEKRNRY

SEQ ID NO: 44577 - protein, 10 aa, Artificial Sequence
  Description of Artificial Sequence: Synthetic epitope
SESEKTSDQD

SEQ ID NO: 44578 - protein, 10 aa, Artificial Sequence
  Description of Artificial Sequence: Synthetic epitope
SESELQMLAS

SEQ ID NO: 44579 - protein, 10 aa, Artificial Sequence
  Description of Artificial Sequence: Synthetic epitope
SESELSEGEL

SEQ ID NO: 44580 - protein, 10 aa, Artificial Sequence
  Description of Artificial Sequence: Synthetic epitope
SESEMETDSG

SEQ ID NO: 44581 - protein, 10 aa, Artificial Sequence
  Description of Artificial Sequence: Synthetic epitope
SESESESEAG

SEQ ID NO: 44582 - protein, 10 aa, Artificial Sequence
  Description of Artificial Sequence: Synthetic epitope
SESEVHFDVE

SEQ ID NO: 44583 - protein, 10 aa, Artificial Sequence
  Description of Artificial Sequence: Synthetic epitope
SESEVIAEGK

SEQ ID NO: 44584 - protein, 10 aa, Artificial Sequence
  Description of Artificial Sequence: Synthetic epitope
SESFQSNAQK

SEQ ID NO: 44585 - protein, 10 aa, Artificial Sequence
  Description of Artificial Sequence: Synthetic epitope
SESGAVIRGN

SEQ ID NO: 44586 - protein, 10 aa, Artificial Sequence
  Description of Artificial Sequence: Synthetic epitope
SESGMAAKSD

SEQ ID NO: 44587 - protein, 10 aa, Artificial Sequence
  Description of Artificial Sequence: Synthetic epitope
SESGSESGEQ

SEQ ID NO: 44588 - protein, 10 aa, Artificial Sequence
  Description of Artificial Sequence: Synthetic epitope
SESHISLAPQ

SEQ ID NO: 44589 - protein, 10 aa, Artificial Sequence
  Description of Artificial Sequence: Synthetic epitope
SESIKKPMIV

SEQ ID NO: 44590 - protein, 10 aa, Artificial Sequence
  Description of Artificial Sequence: Synthetic epitope
SESIKKSEEK

SEQ ID NO: 44591 - protein, 10 aa, Artificial Sequence
  Description of Artificial Sequence: Synthetic epitope
SESKDRKLYK

SEQ ID NO: 44592 - protein, 10 aa, Artificial Sequence
  Description of Artificial Sequence: Synthetic epitope
SESKEAKKSE

SEQ ID NO: 44593 - protein, 10 aa, Artificial Sequence
  Description of Artificial Sequence: Synthetic epitope
SESKESQKND

SEQ ID NO: 44594 - protein, 10 aa, Artificial Sequence
  Description of Artificial Sequence: Synthetic epitope
SESKKLKVSV

SEQ ID NO: 44595 - protein, 10 aa, Artificial Sequence
  Description of Artificial Sequence: Synthetic epitope
SESKSAVQAA

SEQ ID NO: 44596 - protein, 10 aa, Artificial Sequence
  Description of Artificial Sequence: Synthetic epitope
SESKSFVEDL

SEQ ID NO: 44597 - protein, 10 aa, Artificial Sequence
  Description of Artificial Sequence: Synthetic epitope
SESKVYQPVS

SEQ ID NO: 44598 - protein, 10 aa, Artificial Sequence
  Description of Artificial Sequence: Synthetic epitope
SESLHSLATS

SEQ ID NO: 44599 - protein, 10 aa, Artificial Sequence
  Description of Artificial Sequence: Synthetic epitope
SESLKQSSKE

SEQ ID NO: 44600 - protein, 10 aa, Artificial Sequence
  Description of Artificial Sequence: Synthetic epitope
SESLNSSAPR

SEQ ID NO: 44601 - protein, 10 aa, Artificial Sequence
  Description of Artificial Sequence: Synthetic epitope
SESMAKKQPA

SEQ ID NO: 44602 - protein, 10 aa, Artificial Sequence
  Description of Artificial Sequence: Synthetic epitope
SESNSTLENS

SEQ ID NO: 44603 - protein, 10 aa, Artificial Sequence
  Description of Artificial Sequence: Synthetic epitope
SESNVSVKEE

SEQ ID NO: 44604 - protein, 10 aa, Artificial Sequence
  Description of Artificial Sequence: Synthetic epitope
SESPDLEFEY

SEQ ID NO: 44605 - protein, 10 aa, Artificial Sequence
  Description of Artificial Sequence: Synthetic epitope
SESPDVDQAS

SEQ ID NO: 44606 - protein, 10 aa, Artificial Sequence
  Description of Artificial Sequence: Synthetic epitope
SESPGSLSEV

SEQ ID NO: 44607 - protein, 10 aa, Artificial Sequence
  Description of Artificial Sequence: Synthetic epitope
SESPKGAIGH

SEQ ID NO: 44608 - protein, 10 aa, Artificial Sequence
  Description of Artificial Sequence: Synthetic epitope
SESPSDNQAF

SEQ ID NO: 44609 - protein, 10 aa, Artificial Sequence
  Description of Artificial Sequence: Synthetic epitope
SESPSSLIFY

SEQ ID NO: 44610 - protein, 10 aa, Artificial Sequence
  Description of Artificial Sequence: Synthetic epitope
SESQVNSRPM

SEQ ID NO: 44611 - protein, 10 aa, Artificial Sequence
  Description of Artificial Sequence: Synthetic epitope
SESQVSEEQE

SEQ ID NO: 44612 - protein, 10 aa, Artificial Sequence
  Description of Artificial Sequence: Synthetic epitope
SESRGVNESH

SEQ ID NO: 44613 - protein, 10 aa, Artificial Sequence
  Description of Artificial Sequence: Synthetic epitope
SESSADLPQQ

SEQ ID NO: 44614 - protein, 10 aa, Artificial Sequence
  Description of Artificial Sequence: Synthetic epitope
SESSEAIVRK

SEQ ID NO: 44615 - protein, 10 aa, Artificial Sequence
  Description of Artificial Sequence: Synthetic epitope
SESSISDRLV

SEQ ID NO: 44616 - protein, 10 aa, Artificial Sequence
  Description of Artificial Sequence: Synthetic epitope
SESSLKNRSA

SEQ ID NO: 44617 - protein, 10 aa, Artificial Sequence
  Description of Artificial Sequence: Synthetic epitope
SESSLNYQVL

SEQ ID NO: 44618 - protein, 10 aa, Artificial Sequence
  Description of Artificial Sequence: Synthetic epitope
SESSQEEAGN

SEQ ID NO: 44619 - protein, 10 aa, Artificial Sequence
  Description of Artificial Sequence: Synthetic epitope
SESSQLNKTR

SEQ ID NO: 44620 - protein, 10 aa, Artificial Sequence
  Description of Artificial Sequence: Synthetic epitope
SESSQRTDLS

SEQ ID NO: 44621 - protein, 10 aa, Artificial Sequence
  Description of Artificial Sequence: Synthetic epitope
SESSVKVRLA

SEQ ID NO: 44622 - protein, 10 aa, Artificial Sequence
  Description of Artificial Sequence: Synthetic epitope
SESTASRQGG

SEQ ID NO: 44623 - protein, 10 aa, Artificial Sequence
  Description of Artificial Sequence: Synthetic epitope
SESTAVEEGT

SEQ ID NO: 44624 - protein, 10 aa, Artificial Sequence
  Description of Artificial Sequence: Synthetic epitope
SESTQQMGFV

SEQ ID NO: 44625 - protein, 10 aa, Artificial Sequence
  Description of Artificial Sequence: Synthetic epitope
SESTSSTVNG

SEQ ID NO: 44626 - protein, 10 aa, Artificial Sequence
  Description of Artificial Sequence: Synthetic epitope
SESTTVQQGK

SEQ ID NO: 44627 - protein, 10 aa, Artificial Sequence
  Description of Artificial Sequence: Synthetic epitope
SESVAKLSQD

SEQ ID NO: 44628 - protein, 10 aa, Artificial Sequence
  Description of Artificial Sequence: Synthetic epitope
SESVDAVLSL

SEQ ID NO: 44629 - protein, 10 aa, Artificial Sequence
  Description of Artificial Sequence: Synthetic epitope
SESVEYEAGH

SEQ ID NO: 44630 - protein, 10 aa, Artificial Sequence
  Description of Artificial Sequence: Synthetic epitope
SESVSAETVE

SEQ ID NO: 44631 - protein, 10 aa, Artificial Sequence
  Description of Artificial Sequence: Synthetic epitope
SESVTSIQGG

SEQ ID NO: 44632 - protein, 10 aa, Artificial Sequence
  Description of Artificial Sequence: Synthetic epitope
SETAATPMAT

SEQ ID NO: 44633 - protein, 10 aa, Artificial Sequence
  Description of Artificial Sequence: Synthetic epitope
SETALETTYQ

SEQ ID NO: 44634 - protein, 10 aa, Artificial Sequence
  Description of Artificial Sequence: Synthetic epitope
SETARTPFKS

SEQ ID NO: 44635 - protein, 10 aa, Artificial Sequence
  Description of Artificial Sequence: Synthetic epitope
SETEAIAELS

SEQ ID NO: 44636 - protein, 10 aa, Artificial Sequence
  Description of Artificial Sequence: Synthetic epitope
SETETATSNA

SEQ ID NO: 44637 - protein, 10 aa, Artificial Sequence
  Description of Artificial Sequence: Synthetic epitope
SETFETKVDD

SEQ ID NO: 44638 - protein, 10 aa, Artificial Sequence
  Description of Artificial Sequence: Synthetic epitope
SETFKEGVQE

SEQ ID NO: 44639 - protein, 10 aa, Artificial Sequence
  Description of Artificial Sequence: Synthetic epitope
SETGINSIDM

SEQ ID NO: 44640 - protein, 10 aa, Artificial Sequence
  Description of Artificial Sequence: Synthetic epitope
SETGLSSETQ

SEQ ID NO: 44641 - protein, 10 aa, Artificial Sequence
  Description of Artificial Sequence: Synthetic epitope
SETHTSQDSI

SEQ ID NO: 44642 - protein, 10 aa, Artificial Sequence
  Description of Artificial Sequence: Synthetic epitope
SETLESRHHK

SEQ ID NO: 44643 - protein, 10 aa, Artificial Sequence
  Description of Artificial Sequence: Synthetic epitope
SETLKHKSIE

SEQ ID NO: 44644 - protein, 10 aa, Artificial Sequence
  Description of Artificial Sequence: Synthetic epitope
SETLKPATSI

SEQ ID NO: 44645 - protein, 10 aa, Artificial Sequence
  Description of Artificial Sequence: Synthetic epitope
SETLQAQSEE

SEQ ID NO: 44646 - protein, 10 aa, Artificial Sequence
  Description of Artificial Sequence: Synthetic epitope
SETLVVSSET

SEQ ID NO: 44647 - protein, 10 aa, Artificial Sequence
  Description of Artificial Sequence: Synthetic epitope
SETMEEIEHT

SEQ ID NO: 44648 - protein, 10 aa, Artificial Sequence
  Description of Artificial Sequence: Synthetic epitope
SETNAATTVP

SEQ ID NO: 44649 - protein, 10 aa, Artificial Sequence
  Description of Artificial Sequence: Synthetic epitope
SETNFSEMTE

SEQ ID NO: 44650 - protein, 10 aa, Artificial Sequence
  Description of Artificial Sequence: Synthetic epitope
SETNNVKEDL

SEQ ID NO: 44651 - protein, 10 aa, Artificial Sequence
  Description of Artificial Sequence: Synthetic epitope
SETNTKNLKS

SEQ ID NO: 44652 - protein, 10 aa, Artificial Sequence
  Description of Artificial Sequence: Synthetic epitope
SETNVHDESH

SEQ ID NO: 44653 - protein, 10 aa, Artificial Sequence
  Description of Artificial Sequence: Synthetic epitope
SETQAQDSGE

SEQ ID NO: 44654 - protein, 10 aa, Artificial Sequence
  Description of Artificial Sequence: Synthetic epitope
SETQFAAGTP

SEQ ID NO: 44655 - protein, 10 aa, Artificial Sequence
  Description of Artificial Sequence: Synthetic epitope
SETQINATQA

SEQ ID NO: 44656 - protein, 10 aa, Artificial Sequence
  Description of Artificial Sequence: Synthetic epitope
SETQQAAFHQ

SEQ ID NO: 44657 - protein, 10 aa, Artificial Sequence
  Description of Artificial Sequence: Synthetic epitope
SETQSLEVAQ

SEQ ID NO: 44658 - protein, 10 aa, Artificial Sequence
  Description of Artificial Sequence: Synthetic epitope
SETQTITVSA

SEQ ID NO: 44659 - protein, 10 aa, Artificial Sequence
  Description of Artificial Sequence: Synthetic epitope
SETRALTVGT

SEQ ID NO: 44660 - protein, 10 aa, Artificial Sequence
  Description of Artificial Sequence: Synthetic epitope
SETRKDKVQG

SEQ ID NO: 44661 - protein, 10 aa, Artificial Sequence
  Description of Artificial Sequence: Synthetic epitope
SETRSVSQQA

SEQ ID NO: 44662 - protein, 10 aa, Artificial Sequence
  Description of Artificial Sequence: Synthetic epitope
SETRTEVEVE

SEQ ID NO: 44663 - protein, 10 aa, Artificial Sequence
  Description of Artificial Sequence: Synthetic epitope
SETSEASYSG

SEQ ID NO: 44664 - protein, 10 aa, Artificial Sequence
  Description of Artificial Sequence: Synthetic epitope
SETSEPLTSD

SEQ ID NO: 44665 - protein, 10 aa, Artificial Sequence
  Description of Artificial Sequence: Synthetic epitope
SETSNKIDAE

SEQ ID NO: 44666 - protein, 10 aa, Artificial Sequence
  Description of Artificial Sequence: Synthetic epitope
SETSSVESVM

SEQ ID NO: 44667 - protein, 10 aa, Artificial Sequence
  Description of Artificial Sequence: Synthetic epitope
SETSTMRTTD

SEQ ID NO: 44668 - protein, 10 aa, Artificial Sequence
  Description of Artificial Sequence: Synthetic epitope
SETSVERRSD

SEQ ID NO: 44669 - protein, 10 aa, Artificial Sequence
  Description of Artificial Sequence: Synthetic epitope
SETSVTTAQA

SEQ ID NO: 44670 - protein, 10 aa, Artificial Sequence
  Description of Artificial Sequence: Synthetic epitope
SETTAMLQDE

SEQ ID NO: 44671 - protein, 10 aa, Artificial Sequence
  Description of Artificial Sequence: Synthetic epitope
SETTARTYSH

SEQ ID NO: 44672 - protein, 10 aa, Artificial Sequence
  Description of Artificial Sequence: Synthetic epitope
SETVPKNFPQ

SEQ ID NO: 44673 - protein, 10 aa, Artificial Sequence
  Description of Artificial Sequence: Synthetic epitope
SETVSEASQR

SEQ ID NO: 44674 - protein, 10 aa, Artificial Sequence
  Description of Artificial Sequence: Synthetic epitope
SETVSLSEDE

SEQ ID NO: 44675 - protein, 10 aa, Artificial Sequence
  Description of Artificial Sequence: Synthetic epitope
SETVSTKKTI

SEQ ID NO: 44676 - protein, 10 aa, Artificial Sequence
  Description of Artificial Sequence: Synthetic epitope
SEVAASLQQK

SEQ ID NO: 44677 - protein, 10 aa, Artificial Sequence
  Description of Artificial Sequence: Synthetic epitope
SEVATLISQN

SEQ ID NO: 44678 - protein, 10 aa, Artificial Sequence
  Description of Artificial Sequence: Synthetic epitope
SEVAVSIKVS

SEQ ID NO: 44679 - protein, 10 aa, Artificial Sequence
  Description of Artificial Sequence: Synthetic epitope
SEVEALLASE

SEQ ID NO: 44680 - protein, 10 aa, Artificial Sequence
  Description of Artificial Sequence: Synthetic epitope
SEVEIISQQV

SEQ ID NO: 44681 - protein, 10 aa, Artificial Sequence
  Description of Artificial Sequence: Synthetic epitope
SEVEKGEREA

SEQ ID NO: 44682 - protein, 10 aa, Artificial Sequence
  Description of Artificial Sequence: Synthetic epitope
SEVELEQRRY

SEQ ID NO: 44683 - protein, 10 aa, Artificial Sequence
  Description of Artificial Sequence: Synthetic epitope
SEVELMKVAR

SEQ ID NO: 44684 - protein, 10 aa, Artificial Sequence
  Description of Artificial Sequence: Synthetic epitope
SEVELTRNNE

SEQ ID NO: 44685 - protein, 10 aa, Artificial Sequence
  Description of Artificial Sequence: Synthetic epitope
SEVESELINT

SEQ ID NO: 44686 - protein, 10 aa, Artificial Sequence
  Description of Artificial Sequence: Synthetic epitope
SEVHTKKTVM

SEQ ID NO: 44687 - protein, 10 aa, Artificial Sequence
  Description of Artificial Sequence: Synthetic epitope
SEVISLTLVN

SEQ ID NO: 44688 - protein, 10 aa, Artificial Sequence
  Description of Artificial Sequence: Synthetic epitope
SEVKDDNSAT

SEQ ID NO: 44689 - protein, 10 aa, Artificial Sequence
  Description of Artificial Sequence: Synthetic epitope
SEVKQIEKRD

SEQ ID NO: 44690 - protein, 10 aa, Artificial Sequence
  Description of Artificial Sequence: Synthetic epitope
SEVLELVLEN

SEQ ID NO: 44691 - protein, 10 aa, Artificial Sequence
  Description of Artificial Sequence: Synthetic epitope
SEVLKPKQGT

SEQ ID NO: 44692 - protein, 10 aa, Artificial Sequence
  Description of Artificial Sequence: Synthetic epitope
SEVMFLSLDK

SEQ ID NO: 44693 - protein, 10 aa, Artificial Sequence
  Description of Artificial Sequence: Synthetic epitope
SEVPALSSAS

SEQ ID NO: 44694 - protein, 10 aa, Artificial Sequence
  Description of Artificial Sequence: Synthetic epitope
SEVQANNVVL

SEQ ID NO: 44695 - protein, 10 aa, Artificial Sequence
  Description of Artificial Sequence: Synthetic epitope
SEVQFNSAVP

SEQ ID NO: 44696 - protein, 10 aa, Artificial Sequence
  Description of Artificial Sequence: Synthetic epitope
SEVQNLKGAM

SEQ ID NO: 44697 - protein, 10 aa, Artificial Sequence
  Description of Artificial Sequence: Synthetic epitope
SEVSGSNSLD

SEQ ID NO: 44698 - protein, 10 aa, Artificial Sequence
  Description of Artificial Sequence: Synthetic epitope
SEVSKATLQE

SEQ ID NO: 44699 - protein, 10 aa, Artificial Sequence
  Description of Artificial Sequence: Synthetic epitope
SEVSLDYNII

SEQ ID NO: 44700 - protein, 10 aa, Artificial Sequence
  Description of Artificial Sequence: Synthetic epitope
SEVSSLSGIT

SEQ ID NO: 44701 - protein, 10 aa, Artificial Sequence
  Description of Artificial Sequence: Synthetic epitope
SEVSTAELGK

SEQ ID NO: 44702 - protein, 10 aa, Artificial Sequence
  Description of Artificial Sequence: Synthetic epitope
SEVSTVELLH

SEQ ID NO: 44703 - protein, 10 aa, Artificial Sequence
  Description of Artificial Sequence: Synthetic epitope
SEVTASISSP

SEQ ID NO: 44704 - protein, 10 aa, Artificial Sequence
  Description of Artificial Sequence: Synthetic epitope
SEVTTEDDAS

SEQ ID NO: 44705 - protein, 10 aa, Artificial Sequence
  Description of Artificial Sequence: Synthetic epitope
SEWFLIANRS

SEQ ID NO: 44706 - protein, 10 aa, Artificial Sequence
  Description of Artificial Sequence: Synthetic epitope
SEWISADIGL

SEQ ID NO: 44707 - protein, 10 aa, Artificial Sequence
  Description of Artificial Sequence: Synthetic epitope
SEWQLGPLVE

SEQ ID NO: 44708 - protein, 10 aa, Artificial Sequence
  Description of Artificial Sequence: Synthetic epitope
SEWSKREQIP

SEQ ID NO: 44709 - protein, 10 aa, Artificial Sequence
  Description of Artificial Sequence: Synthetic epitope
SEWTMKAKTE

SEQ ID NO: 44710 - protein, 10 aa, Artificial Sequence
  Description of Artificial Sequence: Synthetic epitope
SEYEKEITSL

SEQ ID NO: 44711 - protein, 10 aa, Artificial Sequence
  Description of Artificial Sequence: Synthetic epitope
SEYIIKTDEN

SEQ ID NO: 44712 - protein, 10 aa, Artificial Sequence
  Description of Artificial Sequence: Synthetic epitope
SEYKPLNMAG

SEQ ID NO: 44713 - protein, 10 aa, Artificial Sequence
  Description of Artificial Sequence: Synthetic epitope
SEYKQVMQRV

SEQ ID NO: 44714 - protein, 10 aa, Artificial Sequence
  Description of Artificial Sequence: Synthetic epitope
SEYLVTLKHE

SEQ ID NO: 44715 - protein, 10 aa, Artificial Sequence
  Description of Artificial Sequence: Synthetic epitope
SEYQVRKSSE

SEQ ID NO: 44716 - protein, 10 aa, Artificial Sequence
  Description of Artificial Sequence: Synthetic epitope
SEYSSGMEAD

SEQ ID NO: 44717 - protein, 10 aa, Artificial Sequence
  Description of Artificial Sequence: Synthetic epitope
SEYSVHSSLA

SEQ ID NO: 44718 - protein, 10 aa, Artificial Sequence
  Description of Artificial Sequence: Synthetic epitope
SEYVGATNSA

SEQ ID NO: 44719 - protein, 10 aa, Artificial Sequence
  Description of Artificial Sequence: Synthetic epitope
SFAAINKFQP

SEQ ID NO: 44720 - protein, 10 aa, Artificial Sequence
  Description of Artificial Sequence: Synthetic epitope
SFADREVQLL

SEQ ID NO: 44721 - protein, 10 aa, Artificial Sequence
  Description of Artificial Sequence: Synthetic epitope
SFAHLSLAPS

SEQ ID NO: 44722 - protein, 10 aa, Artificial Sequence
  Description of Artificial Sequence: Synthetic epitope
SFAQFVTTGE

SEQ ID NO: 44723 - protein, 10 aa, Artificial Sequence
  Description of Artificial Sequence: Synthetic epitope
SFDSQISTTK

SEQ ID NO: 44724 - protein, 10 aa, Artificial Sequence
  Description of Artificial Sequence: Synthetic epitope
SFEKEGSDME

SEQ ID NO: 44725 - protein, 10 aa, Artificial Sequence
  Description of Artificial Sequence: Synthetic epitope
SFEQLSIAGK

SEQ ID NO: 44726 - protein, 10 aa, Artificial Sequence
  Description of Artificial Sequence: Synthetic epitope
SFERSNSLAS

SEQ ID NO: 44727 - protein, 10 aa, Artificial Sequence
  Description of Artificial Sequence: Synthetic epitope
SFETSNREAA

SEQ ID NO: 44728 - protein, 10 aa, Artificial Sequence
  Description of Artificial Sequence: Synthetic epitope
SFEVNSLQKS

SEQ ID NO: 44729 - protein, 10 aa, Artificial Sequence
  Description of Artificial Sequence: Synthetic epitope
SFEYNSYDNH

SEQ ID NO: 44730 - protein, 10 aa, Artificial Sequence
  Description of Artificial Sequence: Synthetic epitope
SFFARAAQKL

SEQ ID NO: 44731 - protein, 10 aa, Artificial Sequence
  Description of Artificial Sequence: Synthetic epitope
SFFKLKESQL

SEQ ID NO: 44732 - protein, 10 aa, Artificial Sequence
  Description of Artificial Sequence: Synthetic epitope
SFFLNYLADT

SEQ ID NO: 44733 - protein, 10 aa, Artificial Sequence
  Description of Artificial Sequence: Synthetic epitope
SFHQTQVSQR

SEQ ID NO: 44734 - protein, 10 aa, Artificial Sequence
  Description of Artificial Sequence: Synthetic epitope
SFHSASKKEQ

SEQ ID NO: 44735 - protein, 10 aa, Artificial Sequence
  Description of Artificial Sequence: Synthetic epitope
SFHTRQKSEG

SEQ ID NO: 44736 - protein, 10 aa, Artificial Sequence
  Description of Artificial Sequence: Synthetic epitope
SFIDSASSNI

SEQ ID NO: 44737 - protein, 10 aa, Artificial Sequence
  Description of Artificial Sequence: Synthetic epitope
SFIEQSTEER

SEQ ID NO: 44738 - protein, 10 aa, Artificial Sequence
  Description of Artificial Sequence: Synthetic epitope
SFITSEASER

SEQ ID NO: 44739 - protein, 10 aa, Artificial Sequence
  Description of Artificial Sequence: Synthetic epitope
SFITSLSKPP

SEQ ID NO: 44740 - protein, 10 aa, Artificial Sequence
  Description of Artificial Sequence: Synthetic epitope
SFKKQSKEIE

SEQ ID NO: 44741 - protein, 10 aa, Artificial Sequence
  Description of Artificial Sequence: Synthetic epitope
SFKLLDQMET

SEQ ID NO: 44742 - protein, 10 aa, Artificial Sequence
  Description of Artificial Sequence: Synthetic epitope
SFKTITSIPE

SEQ ID NO: 44743 - protein, 10 aa, Artificial Sequence
  Description of Artificial Sequence: Synthetic epitope
SFLEQLVKKP

SEQ ID NO: 44744 - protein, 10 aa, Artificial Sequence
  Description of Artificial Sequence: Synthetic epitope
SFLQLGLAKG

SEQ ID NO: 44745 - protein, 10 aa, Artificial Sequence
  Description of Artificial Sequence: Synthetic epitope
SFLRRNINQI

SEQ ID NO: 44746 - protein, 10 aa, Artificial Sequence
  Description of Artificial Sequence: Synthetic epitope
SFLSQTVFQT

SEQ ID NO: 44747 - protein, 10 aa, Artificial Sequence
  Description of Artificial Sequence: Synthetic epitope
SFLSRRAART

SEQ ID NO: 44748 - protein, 10 aa, Artificial Sequence
  Description of Artificial Sequence: Synthetic epitope
SFLVSYIASK

SEQ ID NO: 44749 - protein, 10 aa, Artificial Sequence
  Description of Artificial Sequence: Synthetic epitope
SFMDMLKALF

SEQ ID NO: 44750 - protein, 10 aa, Artificial Sequence
  Description of Artificial Sequence: Synthetic epitope
SFMQGYMKHA

SEQ ID NO: 44751 - protein, 10 aa, Artificial Sequence
  Description of Artificial Sequence: Synthetic epitope
SFMSLQLREL

SEQ ID NO: 44752 - protein, 10 aa, Artificial Sequence
  Description of Artificial Sequence: Synthetic epitope
SFMSRTSKSK

SEQ ID NO: 44753 - protein, 10 aa, Artificial Sequence
  Description of Artificial Sequence: Synthetic epitope
SFNIITQQVD

SEQ ID NO: 44754 - protein, 10 aa, Artificial Sequence
  Description of Artificial Sequence: Synthetic epitope
SFNQTQAWKY

SEQ ID NO: 44755 - protein, 10 aa, Artificial Sequence
  Description of Artificial Sequence: Synthetic epitope
SFNSTAKVSP

SEQ ID NO: 44756 - protein, 10 aa, Artificial Sequence
  Description of Artificial Sequence: Synthetic epitope
SFNVALSLNN

SEQ ID NO: 44757 - protein, 10 aa, Artificial Sequence
  Description of Artificial Sequence: Synthetic epitope
SFPIQKMQID

SEQ ID NO: 44758 - protein, 10 aa, Artificial Sequence
  Description of Artificial Sequence: Synthetic epitope
SFPLSLNKEL

SEQ ID NO: 44759 - protein, 10 aa, Artificial Sequence
  Description of Artificial Sequence: Synthetic epitope
SFPMRSMNES

SEQ ID NO: 44760 - protein, 10 aa, Artificial Sequence
  Description of Artificial Sequence: Synthetic epitope
SFPQLDWGSA

SEQ ID NO: 44761 - protein, 10 aa, Artificial Sequence
  Description of Artificial Sequence: Synthetic epitope
SFPRAAKSAK

SEQ ID NO: 44762 - protein, 10 aa, Artificial Sequence
  Description of Artificial Sequence: Synthetic epitope
SFQKGQAEAK

SEQ ID NO: 44763 - protein, 10 aa, Artificial Sequence
  Description of Artificial Sequence: Synthetic epitope
SFQRKELRMS

SEQ ID NO: 44764 - protein, 10 aa, Artificial Sequence
  Description of Artificial Sequence: Synthetic epitope
SFRESTAGSP

SEQ ID NO: 44765 - protein, 10 aa, Artificial Sequence
  Description of Artificial Sequence: Synthetic epitope
SFRMESIHNK

SEQ ID NO: 44766 - protein, 10 aa, Artificial Sequence
  Description of Artificial Sequence: Synthetic epitope
SFRPGLVSET

SEQ ID NO: 44767 - protein, 10 aa, Artificial Sequence
  Description of Artificial Sequence: Synthetic epitope
SFRQSGLSLN

SEQ ID NO: 44768 - protein, 10 aa, Artificial Sequence
  Description of Artificial Sequence: Synthetic epitope
SFRRTLSRSS

SEQ ID NO: 44769 - protein, 10 aa, Artificial Sequence
  Description of Artificial Sequence: Synthetic epitope
SFRSAEKLAL

SEQ ID NO: 44770 - protein, 10 aa, Artificial Sequence
  Description of Artificial Sequence: Synthetic epitope
SFRSEAGMST

SEQ ID NO: 44771 - protein, 10 aa, Artificial Sequence
  Description of Artificial Sequence: Synthetic epitope
SFRSSEHENA

SEQ ID NO: 44772 - protein, 10 aa, Artificial Sequence
  Description of Artificial Sequence: Synthetic epitope
SFSAVAIVSS

SEQ ID NO: 44773 - protein, 10 aa, Artificial Sequence
  Description of Artificial Sequence: Synthetic epitope
SFSDKQKISL

SEQ ID NO: 44774 - protein, 10 aa, Artificial Sequence
  Description of Artificial Sequence: Synthetic epitope
SFSEDKSKSP

SEQ ID NO: 44775 - protein, 10 aa, Artificial Sequence
  Description of Artificial Sequence: Synthetic epitope
SFSETSSEND

SEQ ID NO: 44776 - protein, 10 aa, Artificial Sequence
  Description of Artificial Sequence: Synthetic epitope
SFSLRAQVKE

SEQ ID NO: 44777 - protein, 10 aa, Artificial Sequence
  Description of Artificial Sequence: Synthetic epitope
SFSMSESKRD

SEQ ID NO: 44778 - protein, 10 aa, Artificial Sequence
  Description of Artificial Sequence: Synthetic epitope
SFSPLAATGK

SEQ ID NO: 44779 - protein, 10 aa, Artificial Sequence
  Description of Artificial Sequence: Synthetic epitope
SFSQKVKIQQ

SEQ ID NO: 44780 - protein, 10 aa, Artificial Sequence
  Description of Artificial Sequence: Synthetic epitope
SFSSKEALSF

SEQ ID NO: 44781 - protein, 10 aa, Artificial Sequence
  Description of Artificial Sequence: Synthetic epitope
SFSSTFSAAE

SEQ ID NO: 44782 - protein, 10 aa, Artificial Sequence
  Description of Artificial Sequence: Synthetic epitope
SFSTSVGNED

SEQ ID NO: 44783 - protein, 10 aa, Artificial Sequence
  Description of Artificial Sequence: Synthetic epitope
SFTELKAYDL

SEQ ID NO: 44784 - protein, 10 aa, Artificial Sequence
  Description of Artificial Sequence: Synthetic epitope
SFTKVTSEKR

SEQ ID NO: 44785 - protein, 10 aa, Artificial Sequence
  Description of Artificial Sequence: Synthetic epitope
SFTNRIAETA

SEQ ID NO: 44786 - protein, 10 aa, Artificial Sequence
  Description of Artificial Sequence: Synthetic epitope
SFTRLDSVSE

SEQ ID NO: 44787 - protein, 10 aa, Artificial Sequence
  Description of Artificial Sequence: Synthetic epitope
SFTSALTSRV

SEQ ID NO: 44788 - protein, 10 aa, Artificial Sequence
  Description of Artificial Sequence: Synthetic epitope
SFTSSNTITE

SEQ ID NO: 44789 - protein, 10 aa, Artificial Sequence
  Description of Artificial Sequence: Synthetic epitope
SFTVMALGPP

SEQ ID NO: 44790 - protein, 10 aa, Artificial Sequence
  Description of Artificial Sequence: Synthetic epitope
SFTYVKEIEV

SEQ ID NO: 44791 - protein, 10 aa, Artificial Sequence
  Description of Artificial Sequence: Synthetic epitope
SFVAKEIDYA

SEQ ID NO: 44792 - protein, 10 aa, Artificial Sequence
  Description of Artificial Sequence: Synthetic epitope
SFVASSLIQE

SEQ ID NO: 44793 - protein, 10 aa, Artificial Sequence
  Description of Artificial Sequence: Synthetic epitope
SFVDASDVTQ

SEQ ID NO: 44794 - protein, 10 aa, Artificial Sequence
  Description of Artificial Sequence: Synthetic epitope
SFVEYVVYTD

SEQ ID NO: 44795 - protein, 10 aa, Artificial Sequence
  Description of Artificial Sequence: Synthetic epitope
SFVKRSNKLN

SEQ ID NO: 44796 - protein, 10 aa, Artificial Sequence
  Description of Artificial Sequence: Synthetic epitope
SFVPEKVASP

SEQ ID NO: 44797 - protein, 10 aa, Artificial Sequence
  Description of Artificial Sequence: Synthetic epitope
SFVTAVEVSG

SEQ ID NO: 44798 - protein, 10 aa, Artificial Sequence
  Description of Artificial Sequence: Synthetic epitope
SFVTSNKPDL

SEQ ID NO: 44799 - protein, 10 aa, Artificial Sequence
  Description of Artificial Sequence: Synthetic epitope
SFYALSNTAM

SEQ ID NO: 44800 - protein, 10 aa, Artificial Sequence
  Description of Artificial Sequence: Synthetic epitope
SFYMLSLTSL

SEQ ID NO: 44801 - protein, 10 aa, Artificial Sequence
  Description of Artificial Sequence: Synthetic epitope
SFYYIKAKLE

SEQ ID NO: 44802 - protein, 10 aa, Artificial Sequence
  Description of Artificial Sequence: Synthetic epitope
SGAAKEEDSN

SEQ ID NO: 44803 - protein, 10 aa, Artificial Sequence
  Description of Artificial Sequence: Synthetic epitope
SGAALLADSS

SEQ ID NO: 44804 - protein, 10 aa, Artificial Sequence
  Description of Artificial Sequence: Synthetic epitope
SGAALMADSS

SEQ ID NO: 44805 - protein, 10 aa, Artificial Sequence
  Description of Artificial Sequence: Synthetic epitope
SGAALMADSS

SEQ ID NO: 44806 - protein, 10 aa, Artificial Sequence
  Description of Artificial Sequence: Synthetic epitope
SGAASGLELQ

SEQ ID NO: 44807 - protein, 10 aa, Artificial Sequence
  Description of Artificial Sequence: Synthetic epitope
SGAAVNSSES

SEQ ID NO: 44808 - protein, 10 aa, Artificial Sequence
  Description of Artificial Sequence: Synthetic epitope
SGAEAKTQKD

SEQ ID NO: 44809 - protein, 10 aa, Artificial Sequence
  Description of Artificial Sequence: Synthetic epitope
SGAEAKTQKG

SEQ ID NO: 44810 - protein, 10 aa, Artificial Sequence
  Description of Artificial Sequence: Synthetic epitope
SGAEVLSYSE

SEQ ID NO: 44811 - protein, 10 aa, Artificial Sequence
  Description of Artificial Sequence: Synthetic epitope
SGAFETKTAN

SEQ ID NO: 44812 - protein, 10 aa, Artificial Sequence
  Description of Artificial Sequence: Synthetic epitope
SGAGSTTSGV

SEQ ID NO: 44813 - protein, 10 aa, Artificial Sequence
  Description of Artificial Sequence: Synthetic epitope
SGALASITET

SEQ ID NO: 44814 - protein, 10 aa, Artificial Sequence
  Description of Artificial Sequence: Synthetic epitope
SGALGSSQSD

SEQ ID NO: 44815 - protein, 10 aa, Artificial Sequence
  Description of Artificial Sequence: Synthetic epitope
SGALIDAASI

SEQ ID NO: 44816 - protein, 10 aa, Artificial Sequence
  Description of Artificial Sequence: Synthetic epitope
SGAMAKHEQI

SEQ ID NO: 44817 - protein, 10 aa, Artificial Sequence
  Description of Artificial Sequence: Synthetic epitope
SGAMTRSQES

SEQ ID NO: 44818 - protein, 10 aa, Artificial Sequence
  Description of Artificial Sequence: Synthetic epitope
SGAMTRSQES

SEQ ID NO: 44819 - protein, 10 aa, Artificial Sequence
  Description of Artificial Sequence: Synthetic epitope
SGAREEFVET

SEQ ID NO: 44820 - protein, 10 aa, Artificial Sequence
  Description of Artificial Sequence: Synthetic epitope
SGASAKALNE

SEQ ID NO: 44821 - protein, 10 aa, Artificial Sequence
  Description of Artificial Sequence: Synthetic epitope
SGASEVEIKT

SEQ ID NO: 44822 - protein, 10 aa, Artificial Sequence
  Description of Artificial Sequence: Synthetic epitope
SGASQISSET

SEQ ID NO: 44823 - protein, 10 aa, Artificial Sequence
  Description of Artificial Sequence: Synthetic epitope
SGASSALEAG

SEQ ID NO: 44824 - protein, 10 aa, Artificial Sequence
  Description of Artificial Sequence: Synthetic epitope
SGASSKSEKN

SEQ ID NO: 44825 - protein, 10 aa, Artificial Sequence
  Description of Artificial Sequence: Synthetic epitope
SGASTATNSD

SEQ ID NO: 44826 - protein, 10 aa, Artificial Sequence
  Description of Artificial Sequence: Synthetic epitope
SGAVAVLSSA

SEQ ID NO: 44827 - protein, 10 aa, Artificial Sequence
  Description of Artificial Sequence: Synthetic epitope
SGAVRNRKQQ

SEQ ID NO: 44828 - protein, 10 aa, Artificial Sequence
  Description of Artificial Sequence: Synthetic epitope
SGAVVAEDSS

SEQ ID NO: 44829 - protein, 10 aa, Artificial Sequence
  Description of Artificial Sequence: Synthetic epitope
SGDAAVTEAE

SEQ ID NO: 44830 - protein, 10 aa, Artificial Sequence
  Description of Artificial Sequence: Synthetic epitope
SGDASKRKAI

SEQ ID NO: 44831 - protein, 10 aa, Artificial Sequence
  Description of Artificial Sequence: Synthetic epitope
SGDAVAKQQT

SEQ ID NO: 44832 - protein, 10 aa, Artificial Sequence
  Description of Artificial Sequence: Synthetic epitope
SGDAVVFVRE

SEQ ID NO: 44833 - protein, 10 aa, Artificial Sequence
  Description of Artificial Sequence: Synthetic epitope
SGDEKVRKSD

SEQ ID NO: 44834 - protein, 10 aa, Artificial Sequence
  Description of Artificial Sequence: Synthetic epitope
SGDHQEQHVS

SEQ ID NO: 44835 - protein, 10 aa, Artificial Sequence
  Description of Artificial Sequence: Synthetic epitope
SGDKKSNIKS

SEQ ID NO: 44836 - protein, 10 aa, Artificial Sequence
  Description of Artificial Sequence: Synthetic epitope
SGDSSAIPQA

SEQ ID NO: 44837 - protein, 10 aa, Artificial Sequence
  Description of Artificial Sequence: Synthetic epitope
SGDSSEQREP

SEQ ID NO: 44838 - protein, 10 aa, Artificial Sequence
  Description of Artificial Sequence: Synthetic epitope
SGDSTALSQS

SEQ ID NO: 44839 - protein, 10 aa, Artificial Sequence
  Description of Artificial Sequence: Synthetic epitope
SGDSVARSHV

SEQ ID NO: 44840 - protein, 10 aa, Artificial Sequence
  Description of Artificial Sequence: Synthetic epitope
SGDTLELMEE

SEQ ID NO: 44841 - protein, 10 aa, Artificial Sequence
  Description of Artificial Sequence: Synthetic epitope
SGDTTAPKKT

SEQ ID NO: 44842 - protein, 10 aa, Artificial Sequence
  Description of Artificial Sequence: Synthetic epitope
SGEAKEAASS

SEQ ID NO: 44843 - protein, 10 aa, Artificial Sequence
  Description of Artificial Sequence: Synthetic epitope
SGEAKSAASG

SEQ ID NO: 44844 - protein, 10 aa, Artificial Sequence
  Description of Artificial Sequence: Synthetic epitope
SGEAMLQLIP

SEQ ID NO: 44845 - protein, 10 aa, Artificial Sequence
  Description of Artificial Sequence: Synthetic epitope
SGEASFVWNV

SEQ ID NO: 44846 - protein, 10 aa, Artificial Sequence
  Description of Artificial Sequence: Synthetic epitope
SGEASLEEDL

SEQ ID NO: 44847 - protein, 10 aa, Artificial Sequence
  Description of Artificial Sequence: Synthetic epitope
SGEATNTVTK

SEQ ID NO: 44848 - protein, 10 aa, Artificial Sequence
  Description of Artificial Sequence: Synthetic epitope
SGEATVLAYH

SEQ ID NO: 44849 - protein, 10 aa, Artificial Sequence
  Description of Artificial Sequence: Synthetic epitope
SGEDDEVKRS

SEQ ID NO: 44850 - protein, 10 aa, Artificial Sequence
  Description of Artificial Sequence: Synthetic epitope
SGEFGVKEET

SEQ ID NO: 44851 - protein, 10 aa, Artificial Sequence
  Description of Artificial Sequence: Synthetic epitope
SGEIDNSSET

SEQ ID NO: 44852 - protein, 10 aa, Artificial Sequence
  Description of Artificial Sequence: Synthetic epitope
SGEKKTKLRA

SEQ ID NO: 44853 - protein, 10 aa, Artificial Sequence
  Description of Artificial Sequence: Synthetic epitope
SGEKLKVVNE

SEQ ID NO: 44854 - protein, 10 aa, Artificial Sequence
  Description of Artificial Sequence: Synthetic epitope
SGELSGIRAG

SEQ ID NO: 44855 - protein, 10 aa, Artificial Sequence
  Description of Artificial Sequence: Synthetic epitope
SGEMSTMWLE

SEQ ID NO: 44856 - protein, 10 aa, Artificial Sequence
  Description of Artificial Sequence: Synthetic epitope
SGEQKTDIHQ

SEQ ID NO: 44857 - protein, 10 aa, Artificial Sequence
  Description of Artificial Sequence: Synthetic epitope
SGESEVAGGA

SEQ ID NO: 44858 - protein, 10 aa, Artificial Sequence
  Description of Artificial Sequence: Synthetic epitope
SGESLSANIE

SEQ ID NO: 44859 - protein, 10 aa, Artificial Sequence
  Description of Artificial Sequence: Synthetic epitope
SGESSLVEID

SEQ ID NO: 44860 - protein, 10 aa, Artificial Sequence
  Description of Artificial Sequence: Synthetic epitope
SGESSVAMGT

SEQ ID NO: 44861 - protein, 10 aa, Artificial Sequence
  Description of Artificial Sequence: Synthetic epitope
SGETARRIQD

SEQ ID NO: 44862 - protein, 10 aa, Artificial Sequence
  Description of Artificial Sequence: Synthetic epitope
SGETLAAGTS

SEQ ID NO: 44863 - protein, 10 aa, Artificial Sequence
  Description of Artificial Sequence: Synthetic epitope
SGEVSILIRS

SEQ ID NO: 44864 - protein, 10 aa, Artificial Sequence
  Description of Artificial Sequence: Synthetic epitope
SGEYSFEKEE

SEQ ID NO: 44865 - protein, 10 aa, Artificial Sequence
  Description of Artificial Sequence: Synthetic epitope
SGFBFBBLGM

SEQ ID NO: 44866 - protein, 10 aa, Artificial Sequence
  Description of Artificial Sequence: Synthetic epitope
SGFDSTNQHT

SEQ ID NO: 44867 - protein, 10 aa, Artificial Sequence
  Description of Artificial Sequence: Synthetic epitope
SGFEWIESKD

SEQ ID NO: 44868 - protein, 10 aa, Artificial Sequence
  Description of Artificial Sequence: Synthetic epitope
SGFLKSISNV

SEQ ID NO: 44869 - protein, 10 aa, Artificial Sequence
  Description of Artificial Sequence: Synthetic epitope
SGFMAMVKNF

SEQ ID NO: 44870 - protein, 10 aa, Artificial Sequence
  Description of Artificial Sequence: Synthetic epitope
SGFPKSVKSR

SEQ ID NO: 44871 - protein, 10 aa, Artificial Sequence
  Description of Artificial Sequence: Synthetic epitope
SGFQLATLSG

SEQ ID NO: 44872 - protein, 10 aa, Artificial Sequence
  Description of Artificial Sequence: Synthetic epitope
SGFVAQIEKL

SEQ ID NO: 44873 - protein, 10 aa, Artificial Sequence
  Description of Artificial Sequence: Synthetic epitope
SGGAQTLALA

SEQ ID NO: 44874 - protein, 10 aa, Artificial Sequence
  Description of Artificial Sequence: Synthetic epitope
SGGEVSEELS

SEQ ID NO: 44875 - protein, 10 aa, Artificial Sequence
  Description of Artificial Sequence: Synthetic epitope
SGGIWSITAK

SEQ ID NO: 44876 - protein, 10 aa, Artificial Sequence
  Description of Artificial Sequence: Synthetic epitope
SGGKENTASS

SEQ ID NO: 44877 - protein, 10 aa, Artificial Sequence
  Description of Artificial Sequence: Synthetic epitope
SGGKIALSEE

SEQ ID NO: 44878 - protein, 10 aa, Artificial Sequence
  Description of Artificial Sequence: Synthetic epitope
SGGLKASTEL

SEQ ID NO: 44879 - protein, 10 aa, Artificial Sequence
  Description of Artificial Sequence: Synthetic epitope
SGGLKNSKHE

SEQ ID NO: 44880 - protein, 10 aa, Artificial Sequence
  Description of Artificial Sequence: Synthetic epitope
SGGNNASSQA

SEQ ID NO: 44881 - protein, 10 aa, Artificial Sequence
  Description of Artificial Sequence: Synthetic epitope
SGGQALRSEE

SEQ ID NO: 44882 - protein, 10 aa, Artificial Sequence
  Description of Artificial Sequence: Synthetic epitope
SGGRKSLSQP

SEQ ID NO: 44883 - protein, 10 aa, Artificial Sequence
  Description of Artificial Sequence: Synthetic epitope
SGGSLEIDFQ

SEQ ID NO: 44884 - protein, 10 aa, Artificial Sequence
  Description of Artificial Sequence: Synthetic epitope
SGGTTLAQIA

SEQ ID NO: 44885 - protein, 10 aa, Artificial Sequence
  Description of Artificial Sequence: Synthetic epitope
SGHSAALQVP

SEQ ID NO: 44886 - protein, 10 aa, Artificial Sequence
  Description of Artificial Sequence: Synthetic epitope
SGIEAIQKDS

SEQ ID NO: 44887 - protein, 10 aa, Artificial Sequence
  Description of Artificial Sequence: Synthetic epitope
SGIGSMQNEQ

SEQ ID NO: 44888 - protein, 10 aa, Artificial Sequence
  Description of Artificial Sequence: Synthetic epitope
SGIGWFQPDV

SEQ ID NO: 44889 - protein, 10 aa, Artificial Sequence
  Description of Artificial Sequence: Synthetic epitope
SGIKAKISMK

SEQ ID NO: 44890 - protein, 10 aa, Artificial Sequence
  Description of Artificial Sequence: Synthetic epitope
SGIMEDSAIK

SEQ ID NO: 44891 - protein, 10 aa, Artificial Sequence
  Description of Artificial Sequence: Synthetic epitope
SGIQKKALKA

SEQ ID NO: 44892 - protein, 10 aa, Artificial Sequence
  Description of Artificial Sequence: Synthetic epitope
SGIQSSLDEG

SEQ ID NO: 44893 - protein, 10 aa, Artificial Sequence
  Description of Artificial Sequence: Synthetic epitope
SGISTQNSLS

SEQ ID NO: 44894 - protein, 10 aa, Artificial Sequence
  Description of Artificial Sequence: Synthetic epitope
SGIVHMQAAP

SEQ ID NO: 44895 - protein, 10 aa, Artificial Sequence
  Description of Artificial Sequence: Synthetic epitope
SGIVTEQTNS

SEQ ID NO: 44896 - protein, 10 aa, Artificial Sequence
  Description of Artificial Sequence: Synthetic epitope
SGKDSDSVKL

SEQ ID NO: 44897 - protein, 10 aa, Artificial Sequence
  Description of Artificial Sequence: Synthetic epitope
SGKEAKILQH

SEQ ID NO: 44898 - protein, 10 aa, Artificial Sequence
  Description of Artificial Sequence: Synthetic epitope
SGKEEAIQVA

SEQ ID NO: 44899 - protein, 10 aa, Artificial Sequence
  Description of Artificial Sequence: Synthetic epitope
SGKEQEINET

SEQ ID NO: 44900 - protein, 10 aa, Artificial Sequence
  Description of Artificial Sequence: Synthetic epitope
SGKESTTFIE

SEQ ID NO: 44901 - protein, 10 aa, Artificial Sequence
  Description of Artificial Sequence: Synthetic epitope
SGKGKVLGNE

SEQ ID NO: 44902 - protein, 10 aa, Artificial Sequence
  Description of Artificial Sequence: Synthetic epitope
SGKIPSRFKR

SEQ ID NO: 44903 - protein, 10 aa, Artificial Sequence
  Description of Artificial Sequence: Synthetic epitope
SGKIRRYKSN

SEQ ID NO: 44904 - protein, 10 aa, Artificial Sequence
  Description of Artificial Sequence: Synthetic epitope
SGKLREHELN

SEQ ID NO: 44905 - protein, 10 aa, Artificial Sequence
  Description of Artificial Sequence: Synthetic epitope
SGKLSAAEAQ

SEQ ID NO: 44906 - protein, 10 aa, Artificial Sequence
  Description of Artificial Sequence: Synthetic epitope
SGKPAESSAV

SEQ ID NO: 44907 - protein, 10 aa, Artificial Sequence
  Description of Artificial Sequence: Synthetic epitope
SGKQSTSSQE

SEQ ID NO: 44908 - protein, 10 aa, Artificial Sequence
  Description of Artificial Sequence: Synthetic epitope
SGKSTAKKVY

SEQ ID NO: 44909 - protein, 10 aa, Artificial Sequence
  Description of Artificial Sequence: Synthetic epitope
SGKSTESSIG

SEQ ID NO: 44910 - protein, 10 aa, Artificial Sequence
  Description of Artificial Sequence: Synthetic epitope
SGKVEVAGAD

SEQ ID NO: 44911 - protein, 10 aa, Artificial Sequence
  Description of Artificial Sequence: Synthetic epitope
SGKVILRVTG

SEQ ID NO: 44912 - protein, 10 aa, Artificial Sequence
  Description of Artificial Sequence: Synthetic epitope
SGLAAETSAI

SEQ ID NO: 44913 - protein, 10 aa, Artificial Sequence
  Description of Artificial Sequence: Synthetic epitope
SGLAAVKIKK

SEQ ID NO: 44914 - protein, 10 aa, Artificial Sequence
  Description of Artificial Sequence: Synthetic epitope
SGLAKQAASG

SEQ ID NO: 44915 - protein, 10 aa, Artificial Sequence
  Description of Artificial Sequence: Synthetic epitope
SGLANQWQEV

SEQ ID NO: 44916 - protein, 10 aa, Artificial Sequence
  Description of Artificial Sequence: Synthetic epitope
SGLASQVEAH

SEQ ID NO: 44917 - protein, 10 aa, Artificial Sequence
  Description of Artificial Sequence: Synthetic epitope
SGLDALEVSE

SEQ ID NO: 44918 - protein, 10 aa, Artificial Sequence
  Description of Artificial Sequence: Synthetic epitope
SGLDLMSESG

SEQ ID NO: 44919 - protein, 10 aa, Artificial Sequence
  Description of Artificial Sequence: Synthetic epitope
SGLEKVSKIS

SEQ ID NO: 44920 - protein, 10 aa, Artificial Sequence
  Description of Artificial Sequence: Synthetic epitope
SGLLAREPEE

SEQ ID NO: 44921 - protein, 10 aa, Artificial Sequence
  Description of Artificial Sequence: Synthetic epitope
SGLLENRTEK

SEQ ID NO: 44922 - protein, 10 aa, Artificial Sequence
  Description of Artificial Sequence: Synthetic epitope
SGLLTSLKDN

SEQ ID NO: 44923 - protein, 10 aa, Artificial Sequence
  Description of Artificial Sequence: Synthetic epitope
SGLPLQSSKN

SEQ ID NO: 44924 - protein, 10 aa, Artificial Sequence
  Description of Artificial Sequence: Synthetic epitope
SGLQKSFTLV

SEQ ID NO: 44925 - protein, 10 aa, Artificial Sequence
  Description of Artificial Sequence: Synthetic epitope
SGLQSRYSRV

SEQ ID NO: 44926 - protein, 10 aa, Artificial Sequence
  Description of Artificial Sequence: Synthetic epitope
SGLRELSLAG

SEQ ID NO: 44927 - protein, 10 aa, Artificial Sequence
  Description of Artificial Sequence: Synthetic epitope
SGLSKLVSAQ

SEQ ID NO: 44928 - protein, 10 aa, Artificial Sequence
  Description of Artificial Sequence: Synthetic epitope
SGLSKSRLYP

SEQ ID NO: 44929 - protein, 10 aa, Artificial Sequence
  Description of Artificial Sequence: Synthetic epitope
SGLSLALASE

SEQ ID NO: 44930 - protein, 10 aa, Artificial Sequence
  Description of Artificial Sequence: Synthetic epitope
SGLSLKRKAA

SEQ ID NO: 44931 - protein, 10 aa, Artificial Sequence
  Description of Artificial Sequence: Synthetic epitope
SGLTSKVRPA

SEQ ID NO: 44932 - protein, 10 aa, Artificial Sequence
  Description of Artificial Sequence: Synthetic epitope
SGLTTNVVDI

SEQ ID NO: 44933 - protein, 10 aa, Artificial Sequence
  Description of Artificial Sequence: Synthetic epitope
SGMEARSVEM

SEQ ID NO: 44934 - protein, 10 aa, Artificial Sequence
  Description of Artificial Sequence: Synthetic epitope
SGMKLSTSLS

SEQ ID NO: 44935 - protein, 10 aa, Artificial Sequence
  Description of Artificial Sequence: Synthetic epitope
SGMKQANGQF

SEQ ID NO: 44936 - protein, 10 aa, Artificial Sequence
  Description of Artificial Sequence: Synthetic epitope
SGMQMAEDSK

SEQ ID NO: 44937 - protein, 10 aa, Artificial Sequence
  Description of Artificial Sequence: Synthetic epitope
SGMSISIRSK

SEQ ID NO: 44938 - protein, 10 aa, Artificial Sequence
  Description of Artificial Sequence: Synthetic epitope
SGMVHGEYQN

SEQ ID NO: 44939 - protein, 10 aa, Artificial Sequence
  Description of Artificial Sequence: Synthetic epitope
SGNESKEKLL

SEQ ID NO: 44940 - protein, 10 aa, Artificial Sequence
  Description of Artificial Sequence: Synthetic epitope
SGNIMTKTLL

SEQ ID NO: 44941 - protein, 10 aa, Artificial Sequence
  Description of Artificial Sequence: Synthetic epitope
SGNKHLKIAT

SEQ ID NO: 44942 - protein, 10 aa, Artificial Sequence
  Description of Artificial Sequence: Synthetic epitope
SGNLALAASA

SEQ ID NO: 44943 - protein, 10 aa, Artificial Sequence
  Description of Artificial Sequence: Synthetic epitope
SGNPHIEKES

SEQ ID NO: 44944 - protein, 10 aa, Artificial Sequence
  Description of Artificial Sequence: Synthetic epitope
SGNQESSGQS

SEQ ID NO: 44945 - protein, 10 aa, Artificial Sequence
  Description of Artificial Sequence: Synthetic epitope
SGNSKKMLKR

SEQ ID NO: 44946 - protein, 10 aa, Artificial Sequence
  Description of Artificial Sequence: Synthetic epitope
SGNSLQTRIV

SEQ ID NO: 44947 - protein, 10 aa, Artificial Sequence
  Description of Artificial Sequence: Synthetic epitope
SGNSTAVSLE

SEQ ID NO: 44948 - protein, 10 aa, Artificial Sequence
  Description of Artificial Sequence: Synthetic epitope
SGNVSGVAPA

SEQ ID NO: 44949 - protein, 10 aa, Artificial Sequence
  Description of Artificial Sequence: Synthetic epitope
SGNVTQKDSS

SEQ ID NO: 44950 - protein, 10 aa, Artificial Sequence
  Description of Artificial Sequence: Synthetic epitope
SGPDKVMKVM

SEQ ID NO: 44951 - protein, 10 aa, Artificial Sequence
  Description of Artificial Sequence: Synthetic epitope
SGPELAAMMK

SEQ ID NO: 44952 - protein, 10 aa, Artificial Sequence
  Description of Artificial Sequence: Synthetic epitope
SGPELAAMMK

SEQ ID NO: 44953 - protein, 10 aa, Artificial Sequence
  Description of Artificial Sequence: Synthetic epitope
SGPGIVSVQS

SEQ ID NO: 44954 - protein, 10 aa, Artificial Sequence
  Description of Artificial Sequence: Synthetic epitope
SGPKAGAADK

SEQ ID NO: 44955 - protein, 10 aa, Artificial Sequence
  Description of Artificial Sequence: Synthetic epitope
SGPKTSAAET

SEQ ID NO: 44956 - protein, 10 aa, Artificial Sequence
  Description of Artificial Sequence: Synthetic epitope
SGPKVAKQVF

SEQ ID NO: 44957 - protein, 10 aa, Artificial Sequence
  Description of Artificial Sequence: Synthetic epitope
SGPMQAALQA

SEQ ID NO: 44958 - protein, 10 aa, Artificial Sequence
  Description of Artificial Sequence: Synthetic epitope
SGPNAANNKK

SEQ ID NO: 44959 - protein, 10 aa, Artificial Sequence
  Description of Artificial Sequence: Synthetic epitope
SGPSETTESN

SEQ ID NO: 44960 - protein, 10 aa, Artificial Sequence
  Description of Artificial Sequence: Synthetic epitope
SGPSTVSEPA

SEQ ID NO: 44961 - protein, 10 aa, Artificial Sequence
  Description of Artificial Sequence: Synthetic epitope
SGPTVASIRE

SEQ ID NO: 44962 - protein, 10 aa, Artificial Sequence
  Description of Artificial Sequence: Synthetic epitope
SGPVMQQSQQ

SEQ ID NO: 44963 - protein, 10 aa, Artificial Sequence
  Description of Artificial Sequence: Synthetic epitope
SGPVTTSKSS

SEQ ID NO: 44964 - protein, 10 aa, Artificial Sequence
  Description of Artificial Sequence: Synthetic epitope
SGPYSQASAA

SEQ ID NO: 44965 - protein, 10 aa, Artificial Sequence
  Description of Artificial Sequence: Synthetic epitope
SGQAKAEIYE

SEQ ID NO: 44966 - protein, 10 aa, Artificial Sequence
  Description of Artificial Sequence: Synthetic epitope
SGQDTKALQD

SEQ ID NO: 44967 - protein, 10 aa, Artificial Sequence
  Description of Artificial Sequence: Synthetic epitope
SGQEASIGKQ

SEQ ID NO: 44968 - protein, 10 aa, Artificial Sequence
  Description of Artificial Sequence: Synthetic epitope
SGQHQRVPHA

SEQ ID NO: 44969 - protein, 10 aa, Artificial Sequence
  Description of Artificial Sequence: Synthetic epitope
SGQKDRYTYN

SEQ ID NO: 44970 - protein, 10 aa, Artificial Sequence
  Description of Artificial Sequence: Synthetic epitope
SGQKSRVIEN

SEQ ID NO: 44971 - protein, 10 aa, Artificial Sequence
  Description of Artificial Sequence: Synthetic epitope
SGQNYSASSK

SEQ ID NO: 44972 - protein, 10 aa, Artificial Sequence
  Description of Artificial Sequence: Synthetic epitope
SGQSRKMTTD

SEQ ID NO: 44973 - protein, 10 aa, Artificial Sequence
  Description of Artificial Sequence: Synthetic epitope
SGQSSTVIEN

SEQ ID NO: 44974 - protein, 10 aa, Artificial Sequence
  Description of Artificial Sequence: Synthetic epitope
SGQTNEIFKA

SEQ ID NO: 44975 - protein, 10 aa, Artificial Sequence
  Description of Artificial Sequence: Synthetic epitope
SGRAASFQRE

SEQ ID NO: 44976 - protein, 10 aa, Artificial Sequence
  Description of Artificial Sequence: Synthetic epitope
SGREQVSLVD

SEQ ID NO: 44977 - protein, 10 aa, Artificial Sequence
  Description of Artificial Sequence: Synthetic epitope
SGRESALSAK

SEQ ID NO: 44978 - protein, 10 aa, Artificial Sequence
  Description of Artificial Sequence: Synthetic epitope
SGRGESKSES

SEQ ID NO: 44979 - protein, 10 aa, Artificial Sequence
  Description of Artificial Sequence: Synthetic epitope
SGRKMATEGG

SEQ ID NO: 44980 - protein, 10 aa, Artificial Sequence
  Description of Artificial Sequence: Synthetic epitope
SGRRMAEAIS

SEQ ID NO: 44981 - protein, 10 aa, Artificial Sequence
  Description of Artificial Sequence: Synthetic epitope
SGSADAARKE

SEQ ID NO: 44982 - protein, 10 aa, Artificial Sequence
  Description of Artificial Sequence: Synthetic epitope
SGSADSGKLA

SEQ ID NO: 44983 - protein, 10 aa, Artificial Sequence
  Description of Artificial Sequence: Synthetic epitope
SGSAGITKRT

SEQ ID NO: 44984 - protein, 10 aa, Artificial Sequence
  Description of Artificial Sequence: Synthetic epitope
SGSAKPVSAR

SEQ ID NO: 44985 - protein, 10 aa, Artificial Sequence
  Description of Artificial Sequence: Synthetic epitope
SGSASDKQVQ

SEQ ID NO: 44986 - protein, 10 aa, Artificial Sequence
  Description of Artificial Sequence: Synthetic epitope
SGSDKENQKG

SEQ ID NO: 44987 - protein, 10 aa, Artificial Sequence
  Description of Artificial Sequence: Synthetic epitope
SGSEEQLEAT

SEQ ID NO: 44988 - protein, 10 aa, Artificial Sequence
  Description of Artificial Sequence: Synthetic epitope
SGSESENSNR

SEQ ID NO: 44989 - protein, 10 aa, Artificial Sequence
  Description of Artificial Sequence: Synthetic epitope
SGSESTDKGS

SEQ ID NO: 44990 - protein, 10 aa, Artificial Sequence
  Description of Artificial Sequence: Synthetic epitope
SGSETVDVLK

SEQ ID NO: 44991 - protein, 10 aa, Artificial Sequence
  Description of Artificial Sequence: Synthetic epitope
SGSEVTQGTV

SEQ ID NO: 44992 - protein, 10 aa, Artificial Sequence
  Description of Artificial Sequence: Synthetic epitope
SGSFVSSRAR

SEQ ID NO: 44993 - protein, 10 aa, Artificial Sequence
  Description of Artificial Sequence: Synthetic epitope
SGSGKMIEDY

SEQ ID NO: 44994 - protein, 10 aa, Artificial Sequence
  Description of Artificial Sequence: Synthetic epitope
SGSGQASVSL

SEQ ID NO: 44995 - protein, 10 aa, Artificial Sequence
  Description of Artificial Sequence: Synthetic epitope
SGSGSSVADE

SEQ ID NO: 44996 - protein, 10 aa, Artificial Sequence
  Description of Artificial Sequence: Synthetic epitope
SGSHTSAASQ

SEQ ID NO: 44997 - protein, 10 aa, Artificial Sequence
  Description of Artificial Sequence: Synthetic epitope
SGSISLIKSM

SEQ ID NO: 44998 - protein, 10 aa, Artificial Sequence
  Description of Artificial Sequence: Synthetic epitope
SGSKAKVRKA

SEQ ID NO: 44999 - protein, 10 aa, Artificial Sequence
  Description of Artificial Sequence: Synthetic epitope
SGSKERASKS

SEQ ID NO: 45000 - protein, 10 aa, Artificial Sequence
  Description of Artificial Sequence: Synthetic epitope
SGSKLVSEEL

SEQ ID NO: 45001 - protein, 10 aa, Artificial Sequence
  Description of Artificial Sequence: Synthetic epitope
SGSKSMAKLI

SEQ ID NO: 45002 - protein, 10 aa, Artificial Sequence
  Description of Artificial Sequence: Synthetic epitope
SGSKSSRRNF

SEQ ID NO: 45003 - protein, 10 aa, Artificial Sequence
  Description of Artificial Sequence: Synthetic epitope
SGSKTKSPSL

SEQ ID NO: 45004 - protein, 10 aa, Artificial Sequence
  Description of Artificial Sequence: Synthetic epitope
SGSLDRRSQE

SEQ ID NO: 45005 - protein, 10 aa, Artificial Sequence
  Description of Artificial Sequence: Synthetic epitope
SGSLGSESTN

SEQ ID NO: 45006 - protein, 10 aa, Artificial Sequence
  Description of Artificial Sequence: Synthetic epitope
SGSLMTQIQN

SEQ ID NO: 45007 - protein, 10 aa, Artificial Sequence
  Description of Artificial Sequence: Synthetic epitope
SGSLQSKALG

SEQ ID NO: 45008 - protein, 10 aa, Artificial Sequence
  Description of Artificial Sequence: Synthetic epitope
SGSLQSLWRA

SEQ ID NO: 45009 - protein, 10 aa, Artificial Sequence
  Description of Artificial Sequence: Synthetic epitope
SGSLSAGDDA

SEQ ID NO: 45010 - protein, 10 aa, Artificial Sequence
  Description of Artificial Sequence: Synthetic epitope
SGSNLTVKVA

SEQ ID NO: 45011 - protein, 10 aa, Artificial Sequence
  Description of Artificial Sequence: Synthetic epitope
SGSNVSAQAP

SEQ ID NO: 45012 - protein, 10 aa, Artificial Sequence
  Description of Artificial Sequence: Synthetic epitope
SGSPMAATAT

SEQ ID NO: 45013 - protein, 10 aa, Artificial Sequence
  Description of Artificial Sequence: Synthetic epitope
SGSPVISDIS

SEQ ID NO: 45014 - protein, 10 aa, Artificial Sequence
  Description of Artificial Sequence: Synthetic epitope
SGSQEEGYSQ

SEQ ID NO: 45015 - protein, 10 aa, Artificial Sequence
  Description of Artificial Sequence: Synthetic epitope
SGSQEKLDFN

SEQ ID NO: 45016 - protein, 10 aa, Artificial Sequence
  Description of Artificial Sequence: Synthetic epitope
SGSQSSRDVT

SEQ ID NO: 45017 - protein, 10 aa, Artificial Sequence
  Description of Artificial Sequence: Synthetic epitope
SGSQTKMSEN

SEQ ID NO: 45018 - protein, 10 aa, Artificial Sequence
  Description of Artificial Sequence: Synthetic epitope
SGSQTTQELE

SEQ ID NO: 45019 - protein, 10 aa, Artificial Sequence
  Description of Artificial Sequence: Synthetic epitope
SGSRQKKSAP

SEQ ID NO: 45020 - protein, 10 aa, Artificial Sequence
  Description of Artificial Sequence: Synthetic epitope
SGSRTTSAGT

SEQ ID NO: 45021 - protein, 10 aa, Artificial Sequence
  Description of Artificial Sequence: Synthetic epitope
SGSSAAKVVL

SEQ ID NO: 45022 - protein, 10 aa, Artificial Sequence
  Description of Artificial Sequence: Synthetic epitope
SGSSAALERI

SEQ ID NO: 45023 - protein, 10 aa, Artificial Sequence
  Description of Artificial Sequence: Synthetic epitope
SGSSKRQQGE

SEQ ID NO: 45024 - protein, 10 aa, Artificial Sequence
  Description of Artificial Sequence: Synthetic epitope
SGSSLNVKAG

SEQ ID NO: 45025 - protein, 10 aa, Artificial Sequence
  Description of Artificial Sequence: Synthetic epitope
SGSSTAEETS

SEQ ID NO: 45026 - protein, 10 aa, Artificial Sequence
  Description of Artificial Sequence: Synthetic epitope
SGSSVATSGQ

SEQ ID NO: 45027 - protein, 10 aa, Artificial Sequence
  Description of Artificial Sequence: Synthetic epitope
SGSSVGDETD

SEQ ID NO: 45028 - protein, 10 aa, Artificial Sequence
  Description of Artificial Sequence: Synthetic epitope
SGSTGEKQFI

SEQ ID NO: 45029 - protein, 10 aa, Artificial Sequence
  Description of Artificial Sequence: Synthetic epitope
SGSTMRRMAL

SEQ ID NO: 45030 - protein, 10 aa, Artificial Sequence
  Description of Artificial Sequence: Synthetic epitope
SGSTSASELL

SEQ ID NO: 45031 - protein, 10 aa, Artificial Sequence
  Description of Artificial Sequence: Synthetic epitope
SGSTSISAPT

SEQ ID NO: 45032 - protein, 10 aa, Artificial Sequence
  Description of Artificial Sequence: Synthetic epitope
SGSTTSADLP

SEQ ID NO: 45033 - protein, 10 aa, Artificial Sequence
  Description of Artificial Sequence: Synthetic epitope
SGSTVEVIPA

SEQ ID NO: 45034 - protein, 10 aa, Artificial Sequence
  Description of Artificial Sequence: Synthetic epitope
SGSVLLVVLE

SEQ ID NO: 45035 - protein, 10 aa, Artificial Sequence
  Description of Artificial Sequence: Synthetic epitope
SGSVTTGTKM

SEQ ID NO: 45036 - protein, 10 aa, Artificial Sequence
  Description of Artificial Sequence: Synthetic epitope
SGTAKRITTE

SEQ ID NO: 45037 - protein, 10 aa, Artificial Sequence
  Description of Artificial Sequence: Synthetic epitope
SGTALKQPAV

SEQ ID NO: 45038 - protein, 10 aa, Artificial Sequence
  Description of Artificial Sequence: Synthetic epitope
SGTAVYENPQ

SEQ ID NO: 45039 - protein, 10 aa, Artificial Sequence
  Description of Artificial Sequence: Synthetic epitope
SGTDTKKSVS

SEQ ID NO: 45040 - protein, 10 aa, Artificial Sequence
  Description of Artificial Sequence: Synthetic epitope
SGTELSSLEQ

SEQ ID NO: 45041 - protein, 10 aa, Artificial Sequence
  Description of Artificial Sequence: Synthetic epitope
SGTENLKDKK

SEQ ID NO: 45042 - protein, 10 aa, Artificial Sequence
  Description of Artificial Sequence: Synthetic epitope
SGTGMKISST

SEQ ID NO: 45043 - protein, 10 aa, Artificial Sequence
  Description of Artificial Sequence: Synthetic epitope
SGTGTAVESL

SEQ ID NO: 45044 - protein, 10 aa, Artificial Sequence
  Description of Artificial Sequence: Synthetic epitope
SGTIAARAQV

SEQ ID NO: 45045 - protein, 10 aa, Artificial Sequence
  Description of Artificial Sequence: Synthetic epitope
SGTIASEANT

SEQ ID NO: 45046 - protein, 10 aa, Artificial Sequence
  Description of Artificial Sequence: Synthetic epitope
SGTKSQSLVS

SEQ ID NO: 45047 - protein, 10 aa, Artificial Sequence
  Description of Artificial Sequence: Synthetic epitope
SGTMVTSTTM

SEQ ID NO: 45048 - protein, 10 aa, Artificial Sequence
  Description of Artificial Sequence: Synthetic epitope
SGTQAQLQTT

SEQ ID NO: 45049 - protein, 10 aa, Artificial Sequence
  Description of Artificial Sequence: Synthetic epitope
SGTRSESRDR

SEQ ID NO: 45050 - protein, 10 aa, Artificial Sequence
  Description of Artificial Sequence: Synthetic epitope
SGTSAQTQAV

SEQ ID NO: 45051 - protein, 10 aa, Artificial Sequence
  Description of Artificial Sequence: Synthetic epitope
SGTSDASPSG

SEQ ID NO: 45052 - protein, 10 aa, Artificial Sequence
  Description of Artificial Sequence: Synthetic epitope
SGTTSTVESD

SEQ ID NO: 45053 - protein, 10 aa, Artificial Sequence
  Description of Artificial Sequence: Synthetic epitope
SGTVENIDYP

SEQ ID NO: 45054 - protein, 10 aa, Artificial Sequence
  Description of Artificial Sequence: Synthetic epitope
SGVAESSTAT

SEQ ID NO: 45055 - protein, 10 aa, Artificial Sequence
  Description of Artificial Sequence: Synthetic epitope
SGVDQMMTYN

SEQ ID NO: 45056 - protein, 10 aa, Artificial Sequence
  Description of Artificial Sequence: Synthetic epitope
SGVGATKLEQ

SEQ ID NO: 45057 - protein, 10 aa, Artificial Sequence
  Description of Artificial Sequence: Synthetic epitope
SGVGRQELLH

SEQ ID NO: 45058 - protein, 10 aa, Artificial Sequence
  Description of Artificial Sequence: Synthetic epitope
SGVIIDREAF

SEQ ID NO: 45059 - protein, 10 aa, Artificial Sequence
  Description of Artificial Sequence: Synthetic epitope
SGVKREVVTA

SEQ ID NO: 45060 - protein, 10 aa, Artificial Sequence
  Description of Artificial Sequence: Synthetic epitope
SGVKSVKNQA

SEQ ID NO: 45061 - protein, 10 aa, Artificial Sequence
  Description of Artificial Sequence: Synthetic epitope
SGVMKSSDEL

SEQ ID NO: 45062 - protein, 10 aa, Artificial Sequence
  Description of Artificial Sequence: Synthetic epitope
SGVMSAIKEW

SEQ ID NO: 45063 - protein, 10 aa, Artificial Sequence
  Description of Artificial Sequence: Synthetic epitope
SGVPSASYSG

SEQ ID NO: 45064 - protein, 10 aa, Artificial Sequence
  Description of Artificial Sequence: Synthetic epitope
SGVRLARLPR

SEQ ID NO: 45065 - protein, 10 aa, Artificial Sequence
  Description of Artificial Sequence: Synthetic epitope
SGVSQEGKQV

SEQ ID NO: 45066 - protein, 10 aa, Artificial Sequence
  Description of Artificial Sequence: Synthetic epitope
SGVSVASAAL

SEQ ID NO: 45067 - protein, 10 aa, Artificial Sequence
  Description of Artificial Sequence: Synthetic epitope
SGVSVSDASA

SEQ ID NO: 45068 - protein, 10 aa, Artificial Sequence
  Description of Artificial Sequence: Synthetic epitope
SGVVDATTFQ

SEQ ID NO: 45069 - protein, 10 aa, Artificial Sequence
  Description of Artificial Sequence: Synthetic epitope
SGVVSKVFNQ

SEQ ID NO: 45070 - protein, 10 aa, Artificial Sequence
  Description of Artificial Sequence: Synthetic epitope
SGVVSVVDSL

SEQ ID NO: 45071 - protein, 10 aa, Artificial Sequence
  Description of Artificial Sequence: Synthetic epitope
SGYGSSINQD

SEQ ID NO: 45072 - protein, 10 aa, Artificial Sequence
  Description of Artificial Sequence: Synthetic epitope
SGYKSLTSLP

SEQ ID NO: 45073 - protein, 10 aa, Artificial Sequence
  Description of Artificial Sequence: Synthetic epitope
SGYRLVSETE

SEQ ID NO: 45074 - protein, 10 aa, Artificial Sequence
  Description of Artificial Sequence: Synthetic epitope
SGYSSQSNTP

SEQ ID NO: 45075 - protein, 10 aa, Artificial Sequence
  Description of Artificial Sequence: Synthetic epitope
SGYVAQEKLA

SEQ ID NO: 45076 - protein, 10 aa, Artificial Sequence
  Description of Artificial Sequence: Synthetic epitope
SHADGQIGYQ

SEQ ID NO: 45077 - protein, 10 aa, Artificial Sequence
  Description of Artificial Sequence: Synthetic epitope
SHALSDYETS

SEQ ID NO: 45078 - protein, 10 aa, Artificial Sequence
  Description of Artificial Sequence: Synthetic epitope
SHAMASAEQQ

SEQ ID NO: 45079 - protein, 10 aa, Artificial Sequence
  Description of Artificial Sequence: Synthetic epitope
SHANAAQERA

SEQ ID NO: 45080 - protein, 10 aa, Artificial Sequence
  Description of Artificial Sequence: Synthetic epitope
SHANQLMIML

SEQ ID NO: 45081 - protein, 10 aa, Artificial Sequence
  Description of Artificial Sequence: Synthetic epitope
SHAQATKINR

SEQ ID NO: 45082 - protein, 10 aa, Artificial Sequence
  Description of Artificial Sequence: Synthetic epitope
SHAQEAVRGQ

SEQ ID NO: 45083 - protein, 10 aa, Artificial Sequence
  Description of Artificial Sequence: Synthetic epitope
SHASINRLVV

SEQ ID NO: 45084 - protein, 10 aa, Artificial Sequence
  Description of Artificial Sequence: Synthetic epitope
SHATKKVQKN

SEQ ID NO: 45085 - protein, 10 aa, Artificial Sequence
  Description of Artificial Sequence: Synthetic epitope
SHATKVQTHK

SEQ ID NO: 45086 - protein, 10 aa, Artificial Sequence
  Description of Artificial Sequence: Synthetic epitope
SHDEITIQPG

SEQ ID NO: 45087 - protein, 10 aa, Artificial Sequence
  Description of Artificial Sequence: Synthetic epitope
SHDELRSPSA

SEQ ID NO: 45088 - protein, 10 aa, Artificial Sequence
  Description of Artificial Sequence: Synthetic epitope
SHDEVFVVLM

SEQ ID NO: 45089 - protein, 10 aa, Artificial Sequence
  Description of Artificial Sequence: Synthetic epitope
SHDLQFQLVE

SEQ ID NO: 45090 - protein, 10 aa, Artificial Sequence
  Description of Artificial Sequence: Synthetic epitope
SHDPMKQWEV

SEQ ID NO: 45091 - protein, 10 aa, Artificial Sequence
  Description of Artificial Sequence: Synthetic epitope
SHDRQLISQD

SEQ ID NO: 45092 - protein, 10 aa, Artificial Sequence
  Description of Artificial Sequence: Synthetic epitope
SHDTRRSKGL

SEQ ID NO: 45093 - protein, 10 aa, Artificial Sequence
  Description of Artificial Sequence: Synthetic epitope
SHEAHKTSLS

SEQ ID NO: 45094 - protein, 10 aa, Artificial Sequence
  Description of Artificial Sequence: Synthetic epitope
SHEEHAATGP

SEQ ID NO: 45095 - protein, 10 aa, Artificial Sequence
  Description of Artificial Sequence: Synthetic epitope
SHEEWSHYNE

SEQ ID NO: 45096 - protein, 10 aa, Artificial Sequence
  Description of Artificial Sequence: Synthetic epitope
SHEGSLSSAA

SEQ ID NO: 45097 - protein, 10 aa, Artificial Sequence
  Description of Artificial Sequence: Synthetic epitope
SHEKLEKAKE

SEQ ID NO: 45098 - protein, 10 aa, Artificial Sequence
  Description of Artificial Sequence: Synthetic epitope
SHELESTQSR

SEQ ID NO: 45099 - protein, 10 aa, Artificial Sequence
  Description of Artificial Sequence: Synthetic epitope
SHELVSTRIA

SEQ ID NO: 45100 - protein, 10 aa, Artificial Sequence
  Description of Artificial Sequence: Synthetic epitope
SHEMDRISYK

SEQ ID NO: 45101 - protein, 10 aa, Artificial Sequence
  Description of Artificial Sequence: Synthetic epitope
SHEQLRVSEA

SEQ ID NO: 45102 - protein, 10 aa, Artificial Sequence
  Description of Artificial Sequence: Synthetic epitope
SHEVESKVLI

SEQ ID NO: 45103 - protein, 10 aa, Artificial Sequence
  Description of Artificial Sequence: Synthetic epitope
SHFKQSAEKL

SEQ ID NO: 45104 - protein, 10 aa, Artificial Sequence
  Description of Artificial Sequence: Synthetic epitope
SHFKSLATGG

SEQ ID NO: 45105 - protein, 10 aa, Artificial Sequence
  Description of Artificial Sequence: Synthetic epitope
SHFRQFIAAI

SEQ ID NO: 45106 - protein, 10 aa, Artificial Sequence
  Description of Artificial Sequence: Synthetic epitope
SHFSTEQVGA

SEQ ID NO: 45107 - protein, 10 aa, Artificial Sequence
  Description of Artificial Sequence: Synthetic epitope
SHGEDATQNS

SEQ ID NO: 45108 - protein, 10 aa, Artificial Sequence
  Description of Artificial Sequence: Synthetic epitope
SHGHQKDIWA

SEQ ID NO: 45109 - protein, 10 aa, Artificial Sequence
  Description of Artificial Sequence: Synthetic epitope
SHGIIQNEAE

SEQ ID NO: 45110 - protein, 10 aa, Artificial Sequence
  Description of Artificial Sequence: Synthetic epitope
SHGSAISESK

SEQ ID NO: 45111 - protein, 10 aa, Artificial Sequence
  Description of Artificial Sequence: Synthetic epitope
SHGSSAAQKQ

SEQ ID NO: 45112 - protein, 10 aa, Artificial Sequence
  Description of Artificial Sequence: Synthetic epitope
SHGSTTSYKK

SEQ ID NO: 45113 - protein, 10 aa, Artificial Sequence
  Description of Artificial Sequence: Synthetic epitope
SHGSVEGRSP

SEQ ID NO: 45114 - protein, 10 aa, Artificial Sequence
  Description of Artificial Sequence: Synthetic epitope
SHGVSTKYLN

SEQ ID NO: 45115 - protein, 10 aa, Artificial Sequence
  Description of Artificial Sequence: Synthetic epitope
SHHSYFTEQK

SEQ ID NO: 45116 - protein, 10 aa, Artificial Sequence
  Description of Artificial Sequence: Synthetic epitope
SHIDTLVQDQ

SEQ ID NO: 45117 - protein, 10 aa, Artificial Sequence
  Description of Artificial Sequence: Synthetic epitope
SHIETKAAVK

SEQ ID NO: 45118 - protein, 10 aa, Artificial Sequence
  Description of Artificial Sequence: Synthetic epitope
SHIKASLAAV

SEQ ID NO: 45119 - protein, 10 aa, Artificial Sequence
  Description of Artificial Sequence: Synthetic epitope
SHILSLASPS

SEQ ID NO: 45120 - protein, 10 aa, Artificial Sequence
  Description of Artificial Sequence: Synthetic epitope
SHIRQEKAKN

SEQ ID NO: 45121 - protein, 10 aa, Artificial Sequence
  Description of Artificial Sequence: Synthetic epitope
SHIRSHSDTS

SEQ ID NO: 45122 - protein, 10 aa, Artificial Sequence
  Description of Artificial Sequence: Synthetic epitope
SHKDQALLSK

SEQ ID NO: 45123 - protein, 10 aa, Artificial Sequence
  Description of Artificial Sequence: Synthetic epitope
SHKENKVEEI

SEQ ID NO: 45124 - protein, 10 aa, Artificial Sequence
  Description of Artificial Sequence: Synthetic epitope
SHKISSKNVQ

SEQ ID NO: 45125 - protein, 10 aa, Artificial Sequence
  Description of Artificial Sequence: Synthetic epitope
SHKKGESKQQ

SEQ ID NO: 45126 - protein, 10 aa, Artificial Sequence
  Description of Artificial Sequence: Synthetic epitope
SHKLYLKKHE

SEQ ID NO: 45127 - protein, 10 aa, Artificial Sequence
  Description of Artificial Sequence: Synthetic epitope
SHKSEIANAP

SEQ ID NO: 45128 - protein, 10 aa, Artificial Sequence
  Description of Artificial Sequence: Synthetic epitope
SHKSFETNAQ

SEQ ID NO: 45129 - protein, 10 aa, Artificial Sequence
  Description of Artificial Sequence: Synthetic epitope
SHKSLSLQSR

SEQ ID NO: 45130 - protein, 10 aa, Artificial Sequence
  Description of Artificial Sequence: Synthetic epitope
SHKTPKSENR

SEQ ID NO: 45131 - protein, 10 aa, Artificial Sequence
  Description of Artificial Sequence: Synthetic epitope
SHKVLKTSET

SEQ ID NO: 45132 - protein, 10 aa, Artificial Sequence
  Description of Artificial Sequence: Synthetic epitope
SHLAAHSNSS

SEQ ID NO: 45133 - protein, 10 aa, Artificial Sequence
  Description of Artificial Sequence: Synthetic epitope
SHLEIRFTKS

SEQ ID NO: 45134 - protein, 10 aa, Artificial Sequence
  Description of Artificial Sequence: Synthetic epitope
SHLESLASSK

SEQ ID NO: 45135 - protein, 10 aa, Artificial Sequence
  Description of Artificial Sequence: Synthetic epitope
SHLHLNNENS

SEQ ID NO: 45136 - protein, 10 aa, Artificial Sequence
  Description of Artificial Sequence: Synthetic epitope
SHLKEAESGV

SEQ ID NO: 45137 - protein, 10 aa, Artificial Sequence
  Description of Artificial Sequence: Synthetic epitope
SHLKSKKGQS

SEQ ID NO: 45138 - protein, 10 aa, Artificial Sequence
  Description of Artificial Sequence: Synthetic epitope
SHLNSKTDVS

SEQ ID NO: 45139 - protein, 10 aa, Artificial Sequence
  Description of Artificial Sequence: Synthetic epitope
SHLQHGQFQA

SEQ ID NO: 45140 - protein, 10 aa, Artificial Sequence
  Description of Artificial Sequence: Synthetic epitope
SHLQLLNSKA

SEQ ID NO: 45141 - protein, 10 aa, Artificial Sequence
  Description of Artificial Sequence: Synthetic epitope
SHLQQRSAQE

SEQ ID NO: 45142 - protein, 10 aa, Artificial Sequence
  Description of Artificial Sequence: Synthetic epitope
SHLQVSNQEI

SEQ ID NO: 45143 - protein, 10 aa, Artificial Sequence
  Description of Artificial Sequence: Synthetic epitope
SHLRESNSSL

SEQ ID NO: 45144 - protein, 10 aa, Artificial Sequence
  Description of Artificial Sequence: Synthetic epitope
SHLSLELADR

SEQ ID NO: 45145 - protein, 10 aa, Artificial Sequence
  Description of Artificial Sequence: Synthetic epitope
SHLSSELKEM

SEQ ID NO: 45146 - protein, 10 aa, Artificial Sequence
  Description of Artificial Sequence: Synthetic epitope
SHLSTSESGE

SEQ ID NO: 45147 - protein, 10 aa, Artificial Sequence
  Description of Artificial Sequence: Synthetic epitope
SHLSTTVKRE

SEQ ID NO: 45148 - protein, 10 aa, Artificial Sequence
  Description of Artificial Sequence: Synthetic epitope
SHLTSAETFT

SEQ ID NO: 45149 - protein, 10 aa, Artificial Sequence
  Description of Artificial Sequence: Synthetic epitope
SHLTSVIQNT

SEQ ID NO: 45150 - protein, 10 aa, Artificial Sequence
  Description of Artificial Sequence: Synthetic epitope
SHMDQKDDHQ

SEQ ID NO: 45151 - protein, 10 aa, Artificial Sequence
  Description of Artificial Sequence: Synthetic epitope
SHMIDKHRKD

SEQ ID NO: 45152 - protein, 10 aa, Artificial Sequence
  Description of Artificial Sequence: Synthetic epitope
SHMNTAVEDA

SEQ ID NO: 45153 - protein, 10 aa, Artificial Sequence
  Description of Artificial Sequence: Synthetic epitope
SHMQQHDILD

SEQ ID NO: 45154 - protein, 10 aa, Artificial Sequence
  Description of Artificial Sequence: Synthetic epitope
SHMTHEVTED

SEQ ID NO: 45155 - protein, 10 aa, Artificial Sequence
  Description of Artificial Sequence: Synthetic epitope
SHNATATTGQ

SEQ ID NO: 45156 - protein, 10 aa, Artificial Sequence
  Description of Artificial Sequence: Synthetic epitope
SHNLLRALST

SEQ ID NO: 45157 - protein, 10 aa, Artificial Sequence
  Description of Artificial Sequence: Synthetic epitope
SHNLMDRKVL

SEQ ID NO: 45158 - protein, 10 aa, Artificial Sequence
  Description of Artificial Sequence: Synthetic epitope
SHNQAVVDDA

SEQ ID NO: 45159 - protein, 10 aa, Artificial Sequence
  Description of Artificial Sequence: Synthetic epitope
SHNQRSVLQL

SEQ ID NO: 45160 - protein, 10 aa, Artificial Sequence
  Description of Artificial Sequence: Synthetic epitope
SHNTVSLMDH

SEQ ID NO: 45161 - protein, 10 aa, Artificial Sequence
  Description of Artificial Sequence: Synthetic epitope
SHNVAAGSYE

SEQ ID NO: 45162 - protein, 10 aa, Artificial Sequence
  Description of Artificial Sequence: Synthetic epitope
SHPGGHSEES

SEQ ID NO: 45163 - protein, 10 aa, Artificial Sequence
  Description of Artificial Sequence: Synthetic epitope
SHPMVAIPEH

SEQ ID NO: 45164 - protein, 10 aa, Artificial Sequence
  Description of Artificial Sequence: Synthetic epitope
SHPVLSKDRN

SEQ ID NO: 45165 - protein, 10 aa, Artificial Sequence
  Description of Artificial Sequence: Synthetic epitope
SHQADIKEAR

SEQ ID NO: 45166 - protein, 10 aa, Artificial Sequence
  Description of Artificial Sequence: Synthetic epitope
SHQESSVVQS

SEQ ID NO: 45167 - protein, 10 aa, Artificial Sequence
  Description of Artificial Sequence: Synthetic epitope
SHQGQQSQSS

SEQ ID NO: 45168 - protein, 10 aa, Artificial Sequence
  Description of Artificial Sequence: Synthetic epitope
SHQHNHGKFQ

SEQ ID NO: 45169 - protein, 10 aa, Artificial Sequence
  Description of Artificial Sequence: Synthetic epitope
SHQLRSKHLA

SEQ ID NO: 45170 - protein, 10 aa, Artificial Sequence
  Description of Artificial Sequence: Synthetic epitope
SHQNAISSDK

SEQ ID NO: 45171 - protein, 10 aa, Artificial Sequence
  Description of Artificial Sequence: Synthetic epitope
SHQPSKVEIS

SEQ ID NO: 45172 - protein, 10 aa, Artificial Sequence
  Description of Artificial Sequence: Synthetic epitope
SHQRKTNQQE

SEQ ID NO: 45173 - protein, 10 aa, Artificial Sequence
  Description of Artificial Sequence: Synthetic epitope
SHQTYGGSWK

SEQ ID NO: 45174 - protein, 10 aa, Artificial Sequence
  Description of Artificial Sequence: Synthetic epitope
SHQWAKTLKY

SEQ ID NO: 45175 - protein, 10 aa, Artificial Sequence
  Description of Artificial Sequence: Synthetic epitope
SHRARSRSNK

SEQ ID NO: 45176 - protein, 10 aa, Artificial Sequence
  Description of Artificial Sequence: Synthetic epitope
SHRASQSLRS

SEQ ID NO: 45177 - protein, 10 aa, Artificial Sequence
  Description of Artificial Sequence: Synthetic epitope
SHRAVESSVS

SEQ ID NO: 45178 - protein, 10 aa, Artificial Sequence
  Description of Artificial Sequence: Synthetic epitope
SHRKTKKPLP

SEQ ID NO: 45179 - protein, 10 aa, Artificial Sequence
  Description of Artificial Sequence: Synthetic epitope
SHRLNEQSRH

SEQ ID NO: 45180 - protein, 10 aa, Artificial Sequence
  Description of Artificial Sequence: Synthetic epitope
SHRRNMAYRA

SEQ ID NO: 45181 - protein, 10 aa, Artificial Sequence
  Description of Artificial Sequence: Synthetic epitope
SHRSEKSEIS

SEQ ID NO: 45182 - protein, 10 aa, Artificial Sequence
  Description of Artificial Sequence: Synthetic epitope
SHRSVVKVLS

SEQ ID NO: 45183 - protein, 10 aa, Artificial Sequence
  Description of Artificial Sequence: Synthetic epitope
SHRTQEDTVV

SEQ ID NO: 45184 - protein, 10 aa, Artificial Sequence
  Description of Artificial Sequence: Synthetic epitope
SHSASSLRPA

SEQ ID NO: 45185 - protein, 10 aa, Artificial Sequence
  Description of Artificial Sequence: Synthetic epitope
SHSDASVGSH

SEQ ID NO: 45186 - protein, 10 aa, Artificial Sequence
  Description of Artificial Sequence: Synthetic epitope
SHSDKTHARE

SEQ ID NO: 45187 - protein, 10 aa, Artificial Sequence
  Description of Artificial Sequence: Synthetic epitope
SHSESQATPH

SEQ ID NO: 45188 - protein, 10 aa, Artificial Sequence
  Description of Artificial Sequence: Synthetic epitope
SHSHMAETAS

SEQ ID NO: 45189 - protein, 10 aa, Artificial Sequence
  Description of Artificial Sequence: Synthetic epitope
SHSITESKSL

SEQ ID NO: 45190 - protein, 10 aa, Artificial Sequence
  Description of Artificial Sequence: Synthetic epitope
SHSKAVLRTS

SEQ ID NO: 45191 - protein, 10 aa, Artificial Sequence
  Description of Artificial Sequence: Synthetic epitope
SHSKDNLKGL

SEQ ID NO: 45192 - protein, 10 aa, Artificial Sequence
  Description of Artificial Sequence: Synthetic epitope
SHSKGKSQNQ

SEQ ID NO: 45193 - protein, 10 aa, Artificial Sequence
  Description of Artificial Sequence: Synthetic epitope
SHSNFTAVSN

SEQ ID NO: 45194 - protein, 10 aa, Artificial Sequence
  Description of Artificial Sequence: Synthetic epitope
SHSQVQEPGG

SEQ ID NO: 45195 - protein, 10 aa, Artificial Sequence
  Description of Artificial Sequence: Synthetic epitope
SHSRAKAEAA

SEQ ID NO: 45196 - protein, 10 aa, Artificial Sequence
  Description of Artificial Sequence: Synthetic epitope
SHSRERSAEK

SEQ ID NO: 45197 - protein, 10 aa, Artificial Sequence
  Description of Artificial Sequence: Synthetic epitope
SHSRRQGVVR

SEQ ID NO: 45198 - protein, 10 aa, Artificial Sequence
  Description of Artificial Sequence: Synthetic epitope
SHSSEQIQAI

SEQ ID NO: 45199 - protein, 10 aa, Artificial Sequence
  Description of Artificial Sequence: Synthetic epitope
SHSSLTKTSN

SEQ ID NO: 45200 - protein, 10 aa, Artificial Sequence
  Description of Artificial Sequence: Synthetic epitope
SHSSTESEHG

SEQ ID NO: 45201 - protein, 10 aa, Artificial Sequence
  Description of Artificial Sequence: Synthetic epitope
SHSSTLTIQK

SEQ ID NO: 45202 - protein, 10 aa, Artificial Sequence
  Description of Artificial Sequence: Synthetic epitope
SHTAQSNVDE

SEQ ID NO: 45203 - protein, 10 aa, Artificial Sequence
  Description of Artificial Sequence: Synthetic epitope
SHTEANSVDA

SEQ ID NO: 45204 - protein, 10 aa, Artificial Sequence
  Description of Artificial Sequence: Synthetic epitope
SHTEGTHDYG

SEQ ID NO: 45205 - protein, 10 aa, Artificial Sequence
  Description of Artificial Sequence: Synthetic epitope
SHTGIQSQDT

SEQ ID NO: 45206 - protein, 10 aa, Artificial Sequence
  Description of Artificial Sequence: Synthetic epitope
SHTLKIQTVG

SEQ ID NO: 45207 - protein, 10 aa, Artificial Sequence
  Description of Artificial Sequence: Synthetic epitope
SHTNLSISTG

SEQ ID NO: 45208 - protein, 10 aa, Artificial Sequence
  Description of Artificial Sequence: Synthetic epitope
SHTSDNLSML

SEQ ID NO: 45209 - protein, 10 aa, Artificial Sequence
  Description of Artificial Sequence: Synthetic epitope
SHVGSTASKN

SEQ ID NO: 45210 - protein, 10 aa, Artificial Sequence
  Description of Artificial Sequence: Synthetic epitope
SHVISALVSE

SEQ ID NO: 45211 - protein, 10 aa, Artificial Sequence
  Description of Artificial Sequence: Synthetic epitope
SHVLVQLPHV

SEQ ID NO: 45212 - protein, 10 aa, Artificial Sequence
  Description of Artificial Sequence: Synthetic epitope
SHVRKSVNAE

SEQ ID NO: 45213 - protein, 10 aa, Artificial Sequence
  Description of Artificial Sequence: Synthetic epitope
SHVSESVNNS

SEQ ID NO: 45214 - protein, 10 aa, Artificial Sequence
  Description of Artificial Sequence: Synthetic epitope
SHVSTSSVKT

SEQ ID NO: 45215 - protein, 10 aa, Artificial Sequence
  Description of Artificial Sequence: Synthetic epitope
SHVTMVVAEL

SEQ ID NO: 45216 - protein, 10 aa, Artificial Sequence
  Description of Artificial Sequence: Synthetic epitope
SHWVEIHQEV

SEQ ID NO: 45217 - protein, 10 aa, Artificial Sequence
  Description of Artificial Sequence: Synthetic epitope
SHYNAELFRI

SEQ ID NO: 45218 - protein, 10 aa, Artificial Sequence
  Description of Artificial Sequence: Synthetic epitope
SHYSALQAAV

SEQ ID NO: 45219 - protein, 10 aa, Artificial Sequence
  Description of Artificial Sequence: Synthetic epitope
SHYSHKSRHM

SEQ ID NO: 45220 - protein, 10 aa, Artificial Sequence
  Description of Artificial Sequence: Synthetic epitope
SIAAKDALER

SEQ ID NO: 45221 - protein, 10 aa, Artificial Sequence
  Description of Artificial Sequence: Synthetic epitope
SIAALKATSQ

SEQ ID NO: 45222 - protein, 10 aa, Artificial Sequence
  Description of Artificial Sequence: Synthetic epitope
SIADNILNSA

SEQ ID NO: 45223 - protein, 10 aa, Artificial Sequence
  Description of Artificial Sequence: Synthetic epitope
SIAEELELSI

SEQ ID NO: 45224 - protein, 10 aa, Artificial Sequence
  Description of Artificial Sequence: Synthetic epitope
SIAENRSAFS

SEQ ID NO: 45225 - protein, 10 aa, Artificial Sequence
  Description of Artificial Sequence: Synthetic epitope
SIAFTSLDMF

SEQ ID NO: 45226 - protein, 10 aa, Artificial Sequence
  Description of Artificial Sequence: Synthetic epitope
SIAGPSSRST

SEQ ID NO: 45227 - protein, 10 aa, Artificial Sequence
  Description of Artificial Sequence: Synthetic epitope
SIAKGVNGSS

SEQ ID NO: 45228 - protein, 10 aa, Artificial Sequence
  Description of Artificial Sequence: Synthetic epitope
SIAKQREAQQ

SEQ ID NO: 45229 - protein, 10 aa, Artificial Sequence
  Description of Artificial Sequence: Synthetic epitope
SIALSSGLEK

SEQ ID NO: 45230 - protein, 10 aa, Artificial Sequence
  Description of Artificial Sequence: Synthetic epitope
SIAMVVTSRE

SEQ ID NO: 45231 - protein, 10 aa, Artificial Sequence
  Description of Artificial Sequence: Synthetic epitope
SIAQKILDAT

SEQ ID NO: 45232 - protein, 10 aa, Artificial Sequence
  Description of Artificial Sequence: Synthetic epitope
SIAQTYALSQ

SEQ ID NO: 45233 - protein, 10 aa, Artificial Sequence
  Description of Artificial Sequence: Synthetic epitope
SIASAFSQAR

SEQ ID NO: 45234 - protein, 10 aa, Artificial Sequence
  Description of Artificial Sequence: Synthetic epitope
SIASQFSMDM

SEQ ID NO: 45235 - protein, 10 aa, Artificial Sequence
  Description of Artificial Sequence: Synthetic epitope
SIATASASAQ

SEQ ID NO: 45236 - protein, 10 aa, Artificial Sequence
  Description of Artificial Sequence: Synthetic epitope
SIATNSESST

SEQ ID NO: 45237 - protein, 10 aa, Artificial Sequence
  Description of Artificial Sequence: Synthetic epitope
SIDAAEIADG

SEQ ID NO: 45238 - protein, 10 aa, Artificial Sequence
  Description of Artificial Sequence: Synthetic epitope
SIDAQDRVLL

SEQ ID NO: 45239 - protein, 10 aa, Artificial Sequence
  Description of Artificial Sequence: Synthetic epitope
SIDLDAVSAL

SEQ ID NO: 45240 - protein, 10 aa, Artificial Sequence
  Description of Artificial Sequence: Synthetic epitope
SIDPKVNSSP

SEQ ID NO: 45241 - protein, 10 aa, Artificial Sequence
  Description of Artificial Sequence: Synthetic epitope
SIDSYQDGQQ

SEQ ID NO: 45242 - protein, 10 aa, Artificial Sequence
  Description of Artificial Sequence: Synthetic epitope
SIDVKDTAHL

SEQ ID NO: 45243 - protein, 10 aa, Artificial Sequence
  Description of Artificial Sequence: Synthetic epitope
SIEGGVTDKS

SEQ ID NO: 45244 - protein, 10 aa, Artificial Sequence
  Description of Artificial Sequence: Synthetic epitope
SIEGTVKLKT

SEQ ID NO: 45245 - protein, 10 aa, Artificial Sequence
  Description of Artificial Sequence: Synthetic epitope
SIEKKSNSTR

SEQ ID NO: 45246 - protein, 10 aa, Artificial Sequence
  Description of Artificial Sequence: Synthetic epitope
SIESAEEIRE

SEQ ID NO: 45247 - protein, 10 aa, Artificial Sequence
  Description of Artificial Sequence: Synthetic epitope
SIESIMQGVR

SEQ ID NO: 45248 - protein, 10 aa, Artificial Sequence
  Description of Artificial Sequence: Synthetic epitope
SIFSQIMNPE

SEQ ID NO: 45249 - protein, 10 aa, Artificial Sequence
  Description of Artificial Sequence: Synthetic epitope
SIFSSAKERT

SEQ ID NO: 45250 - protein, 10 aa, Artificial Sequence
  Description of Artificial Sequence: Synthetic epitope
SIFSSHQTAA

SEQ ID NO: 45251 - protein, 10 aa, Artificial Sequence
  Description of Artificial Sequence: Synthetic epitope
SIGKLSKSDE

SEQ ID NO: 45252 - protein, 10 aa, Artificial Sequence
  Description of Artificial Sequence: Synthetic epitope
SIGQSLKVLS

SEQ ID NO: 45253 - protein, 10 aa, Artificial Sequence
  Description of Artificial Sequence: Synthetic epitope
SIGRMAATPG

SEQ ID NO: 45254 - protein, 10 aa, Artificial Sequence
  Description of Artificial Sequence: Synthetic epitope
SIGSASKSDE

SEQ ID NO: 45255 - protein, 10 aa, Artificial Sequence
  Description of Artificial Sequence: Synthetic epitope
SIGSSQKAHG

SEQ ID NO: 45256 - protein, 10 aa, Artificial Sequence
  Description of Artificial Sequence: Synthetic epitope
SIGVSTSGSQ

SEQ ID NO: 45257 - protein, 10 aa, Artificial Sequence
  Description of Artificial Sequence: Synthetic epitope
SIHSQVFESR

SEQ ID NO: 45258 - protein, 10 aa, Artificial Sequence
  Description of Artificial Sequence: Synthetic epitope
SIIAKILAGY

SEQ ID NO: 45259 - protein, 10 aa, Artificial Sequence
  Description of Artificial Sequence: Synthetic epitope
SIIANAVNEG

SEQ ID NO: 45260 - protein, 10 aa, Artificial Sequence
  Description of Artificial Sequence: Synthetic epitope
SIIDSKVKKV

SEQ ID NO: 45261 - protein, 10 aa, Artificial Sequence
  Description of Artificial Sequence: Synthetic epitope
SIIEAQYLRY

SEQ ID NO: 45262 - protein, 10 aa, Artificial Sequence
  Description of Artificial Sequence: Synthetic epitope
SIIGAKAGKN

SEQ ID NO: 45263 - protein, 10 aa, Artificial Sequence
  Description of Artificial Sequence: Synthetic epitope
SIIKEGIESQ

SEQ ID NO: 45264 - protein, 10 aa, Artificial Sequence
  Description of Artificial Sequence: Synthetic epitope
SIISQQSGEA

SEQ ID NO: 45265 - protein, 10 aa, Artificial Sequence
  Description of Artificial Sequence: Synthetic epitope
SIITEAFPKP

SEQ ID NO: 45266 - protein, 10 aa, Artificial Sequence
  Description of Artificial Sequence: Synthetic epitope
SIITKKLLKA

SEQ ID NO: 45267 - protein, 10 aa, Artificial Sequence
  Description of Artificial Sequence: Synthetic epitope
SIITKYQAYD

SEQ ID NO: 45268 - protein, 10 aa, Artificial Sequence
  Description of Artificial Sequence: Synthetic epitope
SIITVEELTE

SEQ ID NO: 45269 - protein, 10 aa, Artificial Sequence
  Description of Artificial Sequence: Synthetic epitope
SIIVAVIKAE

SEQ ID NO: 45270 - protein, 10 aa, Artificial Sequence
  Description of Artificial Sequence: Synthetic epitope
SIKDEASLPD

SEQ ID NO: 45271 - protein, 10 aa, Artificial Sequence
  Description of Artificial Sequence: Synthetic epitope
SIKDSLGTEQ

SEQ ID NO: 45272 - protein, 10 aa, Artificial Sequence
  Description of Artificial Sequence: Synthetic epitope
SIKENALSSG

SEQ ID NO: 45273 - protein, 10 aa, Artificial Sequence
  Description of Artificial Sequence: Synthetic epitope
SIKGQRLDPM

SEQ ID NO: 45274 - protein, 10 aa, Artificial Sequence
  Description of Artificial Sequence: Synthetic epitope
SIKIMRTSNR

SEQ ID NO: 45275 - protein, 10 aa, Artificial Sequence
  Description of Artificial Sequence: Synthetic epitope
SIKKAQNSQA

SEQ ID NO: 45276 - protein, 10 aa, Artificial Sequence
  Description of Artificial Sequence: Synthetic epitope
SIKKLSPIIE

SEQ ID NO: 45277 - protein, 10 aa, Artificial Sequence
  Description of Artificial Sequence: Synthetic epitope
SIKKTISLLS

SEQ ID NO: 45278 - protein, 10 aa, Artificial Sequence
  Description of Artificial Sequence: Synthetic epitope
SIKLSPLHGK

SEQ ID NO: 45279 - protein, 10 aa, Artificial Sequence
  Description of Artificial Sequence: Synthetic epitope
SIKNQTQLNT

SEQ ID NO: 45280 - protein, 10 aa, Artificial Sequence
  Description of Artificial Sequence: Synthetic epitope
SIKNSLKVAA

SEQ ID NO: 45281 - protein, 10 aa, Artificial Sequence
  Description of Artificial Sequence: Synthetic epitope
SIKQQKVMVQ

SEQ ID NO: 45282 - protein, 10 aa, Artificial Sequence
  Description of Artificial Sequence: Synthetic epitope
SIKRDKRSAD

SEQ ID NO: 45283 - protein, 10 aa, Artificial Sequence
  Description of Artificial Sequence: Synthetic epitope
SIKSFEVIKV

SEQ ID NO: 45284 - protein, 10 aa, Artificial Sequence
  Description of Artificial Sequence: Synthetic epitope
SIKSLALLEE

SEQ ID NO: 45285 - protein, 10 aa, Artificial Sequence
  Description of Artificial Sequence: Synthetic epitope
SIKSNVPADE

SEQ ID NO: 45286 - protein, 10 aa, Artificial Sequence
  Description of Artificial Sequence: Synthetic epitope
SIKTKTEQFQ

SEQ ID NO: 45287 - protein, 10 aa, Artificial Sequence
  Description of Artificial Sequence: Synthetic epitope
SIKVSVSSGG

SEQ ID NO: 45288 - protein, 10 aa, Artificial Sequence
  Description of Artificial Sequence: Synthetic epitope
SIKVTRRSNN

SEQ ID NO: 45289 - protein, 10 aa, Artificial Sequence
  Description of Artificial Sequence: Synthetic epitope
SILDAISQGS

SEQ ID NO: 45290 - protein, 10 aa, Artificial Sequence
  Description of Artificial Sequence: Synthetic epitope
SILDRVNHES

SEQ ID NO: 45291 - protein, 10 aa, Artificial Sequence
  Description of Artificial Sequence: Synthetic epitope
SILEMDETSA

SEQ ID NO: 45292 - protein, 10 aa, Artificial Sequence
  Description of Artificial Sequence: Synthetic epitope
SILEQAAKKT

SEQ ID NO: 45293 - protein, 10 aa, Artificial Sequence
  Description of Artificial Sequence: Synthetic epitope
SILEQAAKKT

SEQ ID NO: 45294 - protein, 10 aa, Artificial Sequence
  Description of Artificial Sequence: Synthetic epitope
SILESERETI

SEQ ID NO: 45295 - protein, 10 aa, Artificial Sequence
  Description of Artificial Sequence: Synthetic epitope
SILKAMKLAS

SEQ ID NO: 45296 - protein, 10 aa, Artificial Sequence
  Description of Artificial Sequence: Synthetic epitope
SILKEANWLV

SEQ ID NO: 45297 - protein, 10 aa, Artificial Sequence
  Description of Artificial Sequence: Synthetic epitope
SILKSRSREN

SEQ ID NO: 45298 - protein, 10 aa, Artificial Sequence
  Description of Artificial Sequence: Synthetic epitope
SILLNSLKQT

SEQ ID NO: 45299 - protein, 10 aa, Artificial Sequence
  Description of Artificial Sequence: Synthetic epitope
SILLSDESSE

SEQ ID NO: 45300 - protein, 10 aa, Artificial Sequence
  Description of Artificial Sequence: Synthetic epitope
SILMHATAHS

SEQ ID NO: 45301 - protein, 10 aa, Artificial Sequence
  Description of Artificial Sequence: Synthetic epitope
SILNSLEQQH

SEQ ID NO: 45302 - protein, 10 aa, Artificial Sequence
  Description of Artificial Sequence: Synthetic epitope
SILQQMNREK

SEQ ID NO: 45303 - protein, 10 aa, Artificial Sequence
  Description of Artificial Sequence: Synthetic epitope
SILQRSSESE

SEQ ID NO: 45304 - protein, 10 aa, Artificial Sequence
  Description of Artificial Sequence: Synthetic epitope
SILRGLNSKQ

SEQ ID NO: 45305 - protein, 10 aa, Artificial Sequence
  Description of Artificial Sequence: Synthetic epitope
SILRSATKDS

SEQ ID NO: 45306 - protein, 10 aa, Artificial Sequence
  Description of Artificial Sequence: Synthetic epitope
SILRSSLSDL

SEQ ID NO: 45307 - protein, 10 aa, Artificial Sequence
  Description of Artificial Sequence: Synthetic epitope
SILRYNSTIQ

SEQ ID NO: 45308 - protein, 10 aa, Artificial Sequence
  Description of Artificial Sequence: Synthetic epitope
SILSVLKGLT

SEQ ID NO: 45309 - protein, 10 aa, Artificial Sequence
  Description of Artificial Sequence: Synthetic epitope
SILSYPKDFT

SEQ ID NO: 45310 - protein, 10 aa, Artificial Sequence
  Description of Artificial Sequence: Synthetic epitope
SILTIQKYYK

SEQ ID NO: 45311 - protein, 10 aa, Artificial Sequence
  Description of Artificial Sequence: Synthetic epitope
SILTKMTGLN

SEQ ID NO: 45312 - protein, 10 aa, Artificial Sequence
  Description of Artificial Sequence: Synthetic epitope
SILWDAISTY

SEQ ID NO: 45313 - protein, 10 aa, Artificial Sequence
  Description of Artificial Sequence: Synthetic epitope
SIMAQSTSIQ

SEQ ID NO: 45314 - protein, 10 aa, Artificial Sequence
  Description of Artificial Sequence: Synthetic epitope
SIMKLSKTKY

SEQ ID NO: 45315 - protein, 10 aa, Artificial Sequence
  Description of Artificial Sequence: Synthetic epitope
SIMKLSKTKY

SEQ ID NO: 45316 - protein, 10 aa, Artificial Sequence
  Description of Artificial Sequence: Synthetic epitope
SIMKSLQDDS

SEQ ID NO: 45317 - protein, 10 aa, Artificial Sequence
  Description of Artificial Sequence: Synthetic epitope
SIMQESIRVN

SEQ ID NO: 45318 - protein, 10 aa, Artificial Sequence
  Description of Artificial Sequence: Synthetic epitope
SIMSVQNQEE

SEQ ID NO: 45319 - protein, 10 aa, Artificial Sequence
  Description of Artificial Sequence: Synthetic epitope
SIMWTKYHMA

SEQ ID NO: 45320 - protein, 10 aa, Artificial Sequence
  Description of Artificial Sequence: Synthetic epitope
SIMYVNTGQG

SEQ ID NO: 45321 - protein, 10 aa, Artificial Sequence
  Description of Artificial Sequence: Synthetic epitope
SINESTDDME

SEQ ID NO: 45322 - protein, 10 aa, Artificial Sequence
  Description of Artificial Sequence: Synthetic epitope
SINEVDESFQ

SEQ ID NO: 45323 - protein, 10 aa, Artificial Sequence
  Description of Artificial Sequence: Synthetic epitope
SINLSAPTRY

SEQ ID NO: 45324 - protein, 10 aa, Artificial Sequence
  Description of Artificial Sequence: Synthetic epitope
SINLSELIDV

SEQ ID NO: 45325 - protein, 10 aa, Artificial Sequence
  Description of Artificial Sequence: Synthetic epitope
SINSMALQKI

SEQ ID NO: 45326 - protein, 10 aa, Artificial Sequence
  Description of Artificial Sequence: Synthetic epitope
SINSSEVPEV

SEQ ID NO: 45327 - protein, 10 aa, Artificial Sequence
  Description of Artificial Sequence: Synthetic epitope
SINSVHDEKM

SEQ ID NO: 45328 - protein, 10 aa, Artificial Sequence
  Description of Artificial Sequence: Synthetic epitope
SINTSQSMHV

SEQ ID NO: 45329 - protein, 10 aa, Artificial Sequence
  Description of Artificial Sequence: Synthetic epitope
SINYIFASDS

SEQ ID NO: 45330 - protein, 10 aa, Artificial Sequence
  Description of Artificial Sequence: Synthetic epitope
SIPKLVQKRV

SEQ ID NO: 45331 - protein, 10 aa, Artificial Sequence
  Description of Artificial Sequence: Synthetic epitope
SIPLDVLSAS

SEQ ID NO: 45332 - protein, 10 aa, Artificial Sequence
  Description of Artificial Sequence: Synthetic epitope
SIPQSSLEPL

SEQ ID NO: 45333 - protein, 10 aa, Artificial Sequence
  Description of Artificial Sequence: Synthetic epitope
SIPVKKRMAL

SEQ ID NO: 45334 - protein, 10 aa, Artificial Sequence
  Description of Artificial Sequence: Synthetic epitope
SIPVQEAQEA

SEQ ID NO: 45335 - protein, 10 aa, Artificial Sequence
  Description of Artificial Sequence: Synthetic epitope
SIQAASDHIS

SEQ ID NO: 45336 - protein, 10 aa, Artificial Sequence
  Description of Artificial Sequence: Synthetic epitope
SIQDDSSVAQ

SEQ ID NO: 45337 - protein, 10 aa, Artificial Sequence
  Description of Artificial Sequence: Synthetic epitope
SIQENISSLQ

SEQ ID NO: 45338 - protein, 10 aa, Artificial Sequence
  Description of Artificial Sequence: Synthetic epitope
SIQMNQAENS

SEQ ID NO: 45339 - protein, 10 aa, Artificial Sequence
  Description of Artificial Sequence: Synthetic epitope
SIQQELYSPQ

SEQ ID NO: 45340 - protein, 10 aa, Artificial Sequence
  Description of Artificial Sequence: Synthetic epitope
SIQQITVISP

SEQ ID NO: 45341 - protein, 10 aa, Artificial Sequence
  Description of Artificial Sequence: Synthetic epitope
SIQQTMARQS

SEQ ID NO: 45342 - protein, 10 aa, Artificial Sequence
  Description of Artificial Sequence: Synthetic epitope
SIQRPAQSRD

SEQ ID NO: 45343 - protein, 10 aa, Artificial Sequence
  Description of Artificial Sequence: Synthetic epitope
SIQSNVSKDS

SEQ ID NO: 45344 - protein, 10 aa, Artificial Sequence
  Description of Artificial Sequence: Synthetic epitope
SIQSPSNWNP

SEQ ID NO: 45345 - protein, 10 aa, Artificial Sequence
  Description of Artificial Sequence: Synthetic epitope
SIQSRLSMVN

SEQ ID NO: 45346 - protein, 10 aa, Artificial Sequence
  Description of Artificial Sequence: Synthetic epitope
SIQTAEKQNW

SEQ ID NO: 45347 - protein, 10 aa, Artificial Sequence
  Description of Artificial Sequence: Synthetic epitope
SIRDSVVEIL

SEQ ID NO: 45348 - protein, 10 aa, Artificial Sequence
  Description of Artificial Sequence: Synthetic epitope
SIREKQSDDE

SEQ ID NO: 45349 - protein, 10 aa, Artificial Sequence
  Description of Artificial Sequence: Synthetic epitope
SIRPWKQMYV

SEQ ID NO: 45350 - protein, 10 aa, Artificial Sequence
  Description of Artificial Sequence: Synthetic epitope
SIRSRKARAV

SEQ ID NO: 45351 - protein, 10 aa, Artificial Sequence
  Description of Artificial Sequence: Synthetic epitope
SIRTSELRLS

SEQ ID NO: 45352 - protein, 10 aa, Artificial Sequence
  Description of Artificial Sequence: Synthetic epitope
SISAMEATIT

SEQ ID NO: 45353 - protein, 10 aa, Artificial Sequence
  Description of Artificial Sequence: Synthetic epitope
SISAQQRLVS

SEQ ID NO: 45354 - protein, 10 aa, Artificial Sequence
  Description of Artificial Sequence: Synthetic epitope
SISEDARISG

SEQ ID NO: 45355 - protein, 10 aa, Artificial Sequence
  Description of Artificial Sequence: Synthetic epitope
SISEGDDKIE

SEQ ID NO: 45356 - protein, 10 aa, Artificial Sequence
  Description of Artificial Sequence: Synthetic epitope
SISEKQSLVL

SEQ ID NO: 45357 - protein, 10 aa, Artificial Sequence
  Description of Artificial Sequence: Synthetic epitope
SISETSKTSK

SEQ ID NO: 45358 - protein, 10 aa, Artificial Sequence
  Description of Artificial Sequence: Synthetic epitope
SISEYSNKPD

SEQ ID NO: 45359 - protein, 10 aa, Artificial Sequence
  Description of Artificial Sequence: Synthetic epitope
SISFATELQS

SEQ ID NO: 45360 - protein, 10 aa, Artificial Sequence
  Description of Artificial Sequence: Synthetic epitope
SISFVRSSVK

SEQ ID NO: 45361 - protein, 10 aa, Artificial Sequence
  Description of Artificial Sequence: Synthetic epitope
SISGSYVLDQ

SEQ ID NO: 45362 - protein, 10 aa, Artificial Sequence
  Description of Artificial Sequence: Synthetic epitope
SISKKPLDIG

SEQ ID NO: 45363 - protein, 10 aa, Artificial Sequence
  Description of Artificial Sequence: Synthetic epitope
SISKKSTDKE

SEQ ID NO: 45364 - protein, 10 aa, Artificial Sequence
  Description of Artificial Sequence: Synthetic epitope
SISKNKTQID

SEQ ID NO: 45365 - protein, 10 aa, Artificial Sequence
  Description of Artificial Sequence: Synthetic epitope
SISLNMFSLL

SEQ ID NO: 45366 - protein, 10 aa, Artificial Sequence
  Description of Artificial Sequence: Synthetic epitope
SISNLSEAGS

SEQ ID NO: 45367 - protein, 10 aa, Artificial Sequence
  Description of Artificial Sequence: Synthetic epitope
SISNRAVLQP

SEQ ID NO: 45368 - protein, 10 aa, Artificial Sequence
  Description of Artificial Sequence: Synthetic epitope
SISQKSVFQM

SEQ ID NO: 45369 - protein, 10 aa, Artificial Sequence
  Description of Artificial Sequence: Synthetic epitope
SISQRINYFL

SEQ ID NO: 45370 - protein, 10 aa, Artificial Sequence
  Description of Artificial Sequence: Synthetic epitope
SISSEDSHDY

SEQ ID NO: 45371 - protein, 10 aa, Artificial Sequence
  Description of Artificial Sequence: Synthetic epitope
SISSQSPLQQ

SEQ ID NO: 45372 - protein, 10 aa, Artificial Sequence
  Description of Artificial Sequence: Synthetic epitope
SISSVLKNLE

SEQ ID NO: 45373 - protein, 10 aa, Artificial Sequence
  Description of Artificial Sequence: Synthetic epitope
SISVEVASNA

SEQ ID NO: 45374 - protein, 10 aa, Artificial Sequence
  Description of Artificial Sequence: Synthetic epitope
SISVIPFSEA

SEQ ID NO: 45375 - protein, 10 aa, Artificial Sequence
  Description of Artificial Sequence: Synthetic epitope
SISVLAGSTV

SEQ ID NO: 45376 - protein, 10 aa, Artificial Sequence
  Description of Artificial Sequence: Synthetic epitope
SISVNQWGSQ

SEQ ID NO: 45377 - protein, 10 aa, Artificial Sequence
  Description of Artificial Sequence: Synthetic epitope
SISVSEHVVR

SEQ ID NO: 45378 - protein, 10 aa, Artificial Sequence
  Description of Artificial Sequence: Synthetic epitope
SISVTKITKP

SEQ ID NO: 45379 - protein, 10 aa, Artificial Sequence
  Description of Artificial Sequence: Synthetic epitope
SITEAHESGP

SEQ ID NO: 45380 - protein, 10 aa, Artificial Sequence
  Description of Artificial Sequence: Synthetic epitope
SITEIMEKTT

SEQ ID NO: 45381 - protein, 10 aa, Artificial Sequence
  Description of Artificial Sequence: Synthetic epitope
SITEVVTTEE

SEQ ID NO: 45382 - protein, 10 aa, Artificial Sequence
  Description of Artificial Sequence: Synthetic epitope
SITKNTAKLD

SEQ ID NO: 45383 - protein, 10 aa, Artificial Sequence
  Description of Artificial Sequence: Synthetic epitope
SITLATRNAK

SEQ ID NO: 45384 - protein, 10 aa, Artificial Sequence
  Description of Artificial Sequence: Synthetic epitope
SITMHKGSLD

SEQ ID NO: 45385 - protein, 10 aa, Artificial Sequence
  Description of Artificial Sequence: Synthetic epitope
SITNSMVDIP

SEQ ID NO: 45386 - protein, 10 aa, Artificial Sequence
  Description of Artificial Sequence: Synthetic epitope
SITRVNTAAS

SEQ ID NO: 45387 - protein, 10 aa, Artificial Sequence
  Description of Artificial Sequence: Synthetic epitope
SITSEAVVPE

SEQ ID NO: 45388 - protein, 10 aa, Artificial Sequence
  Description of Artificial Sequence: Synthetic epitope
SITSLSSRTT

SEQ ID NO: 45389 - protein, 10 aa, Artificial Sequence
  Description of Artificial Sequence: Synthetic epitope
SITSPSSNVT

SEQ ID NO: 45390 - protein, 10 aa, Artificial Sequence
  Description of Artificial Sequence: Synthetic epitope
SITTAASSMT

SEQ ID NO: 45391 - protein, 10 aa, Artificial Sequence
  Description of Artificial Sequence: Synthetic epitope
SITVRTTPVA

SEQ ID NO: 45392 - protein, 10 aa, Artificial Sequence
  Description of Artificial Sequence: Synthetic epitope
SITYETNKVN

SEQ ID NO: 45393 - protein, 10 aa, Artificial Sequence
  Description of Artificial Sequence: Synthetic epitope
SIVADSPSGM

SEQ ID NO: 45394 - protein, 10 aa, Artificial Sequence
  Description of Artificial Sequence: Synthetic epitope
SIVEIVKQEV

SEQ ID NO: 45395 - protein, 10 aa, Artificial Sequence
  Description of Artificial Sequence: Synthetic epitope
SIVNANQIKE

SEQ ID NO: 45396 - protein, 10 aa, Artificial Sequence
  Description of Artificial Sequence: Synthetic epitope
SIVSKPVLYR

SEQ ID NO: 45397 - protein, 10 aa, Artificial Sequence
  Description of Artificial Sequence: Synthetic epitope
SIVSRRVQED

SEQ ID NO: 45398 - protein, 10 aa, Artificial Sequence
  Description of Artificial Sequence: Synthetic epitope
SIVTSMTAGV

SEQ ID NO: 45399 - protein, 10 aa, Artificial Sequence
  Description of Artificial Sequence: Synthetic epitope
SIVVLSGTTA

SEQ ID NO: 45400 - protein, 10 aa, Artificial Sequence
  Description of Artificial Sequence: Synthetic epitope
SIVVTFKEDS

SEQ ID NO: 45401 - protein, 10 aa, Artificial Sequence
  Description of Artificial Sequence: Synthetic epitope
SIWETESLDL

SEQ ID NO: 45402 - protein, 10 aa, Artificial Sequence
  Description of Artificial Sequence: Synthetic epitope
SIYGSSIDVE

SEQ ID NO: 45403 - protein, 10 aa, Artificial Sequence
  Description of Artificial Sequence: Synthetic epitope
SKAAFERESD

SEQ ID NO: 45404 - protein, 10 aa, Artificial Sequence
  Description of Artificial Sequence: Synthetic epitope
SKAAQQTKGS

SEQ ID NO: 45405 - protein, 10 aa, Artificial Sequence
  Description of Artificial Sequence: Synthetic epitope
SKAASNSKET

SEQ ID NO: 45406 - protein, 10 aa, Artificial Sequence
  Description of Artificial Sequence: Synthetic epitope
SKAASVINQA

SEQ ID NO: 45407 - protein, 10 aa, Artificial Sequence
  Description of Artificial Sequence: Synthetic epitope
SKADSLKQLI

SEQ ID NO: 45408 - protein, 10 aa, Artificial Sequence
  Description of Artificial Sequence: Synthetic epitope
SKAEDRNEDP

SEQ ID NO: 45409 - protein, 10 aa, Artificial Sequence
  Description of Artificial Sequence: Synthetic epitope
SKAEKADMEE

SEQ ID NO: 45410 - protein, 10 aa, Artificial Sequence
  Description of Artificial Sequence: Synthetic epitope
SKAEKNSNVE

SEQ ID NO: 45411 - protein, 10 aa, Artificial Sequence
  Description of Artificial Sequence: Synthetic epitope
SKAESTLQNS

SEQ ID NO: 45412 - protein, 10 aa, Artificial Sequence
  Description of Artificial Sequence: Synthetic epitope
SKAETPTESV

SEQ ID NO: 45413 - protein, 10 aa, Artificial Sequence
  Description of Artificial Sequence: Synthetic epitope
SKAETSSYVA

SEQ ID NO: 45414 - protein, 10 aa, Artificial Sequence
  Description of Artificial Sequence: Synthetic epitope
SKAFAVDIKV

SEQ ID NO: 45415 - protein, 10 aa, Artificial Sequence
  Description of Artificial Sequence: Synthetic epitope
SKAFFLSILG

SEQ ID NO: 45416 - protein, 10 aa, Artificial Sequence
  Description of Artificial Sequence: Synthetic epitope
SKAIESGDTD

SEQ ID NO: 45417 - protein, 10 aa, Artificial Sequence
  Description of Artificial Sequence: Synthetic epitope
SKAIGSSPLG

SEQ ID NO: 45418 - protein, 10 aa, Artificial Sequence
  Description of Artificial Sequence: Synthetic epitope
SKAIQVAKQV

SEQ ID NO: 45419 - protein, 10 aa, Artificial Sequence
  Description of Artificial Sequence: Synthetic epitope
SKAKESAEPM

SEQ ID NO: 45420 - protein, 10 aa, Artificial Sequence
  Description of Artificial Sequence: Synthetic epitope
SKAKIAFGQS

SEQ ID NO: 45421 - protein, 10 aa, Artificial Sequence
  Description of Artificial Sequence: Synthetic epitope
SKAKPVAPVS

SEQ ID NO: 45422 - protein, 10 aa, Artificial Sequence
  Description of Artificial Sequence: Synthetic epitope
SKAKSAQGKK

SEQ ID NO: 45423 - protein, 10 aa, Artificial Sequence
  Description of Artificial Sequence: Synthetic epitope
SKALAPQAAL

SEQ ID NO: 45424 - protein, 10 aa, Artificial Sequence
  Description of Artificial Sequence: Synthetic epitope
SKALAVTKQI

SEQ ID NO: 45425 - protein, 10 aa, Artificial Sequence
  Description of Artificial Sequence: Synthetic epitope
SKALELVKQE

SEQ ID NO: 45426 - protein, 10 aa, Artificial Sequence
  Description of Artificial Sequence: Synthetic epitope
SKAMLKVQED

SEQ ID NO: 45427 - protein, 10 aa, Artificial Sequence
  Description of Artificial Sequence: Synthetic epitope
SKAMSVAKQV

SEQ ID NO: 45428 - protein, 10 aa, Artificial Sequence
  Description of Artificial Sequence: Synthetic epitope
SKANVLPKDQ

SEQ ID NO: 45429 - protein, 10 aa, Artificial Sequence
  Description of Artificial Sequence: Synthetic epitope
SKAPYNKAHK

SEQ ID NO: 45430 - protein, 10 aa, Artificial Sequence
  Description of Artificial Sequence: Synthetic epitope
SKARDPSSIQ

SEQ ID NO: 45431 - protein, 10 aa, Artificial Sequence
  Description of Artificial Sequence: Synthetic epitope
SKASASLNGD

SEQ ID NO: 45432 - protein, 10 aa, Artificial Sequence
  Description of Artificial Sequence: Synthetic epitope
SKASELNLDE

SEQ ID NO: 45433 - protein, 10 aa, Artificial Sequence
  Description of Artificial Sequence: Synthetic epitope
SKASESISLK

SEQ ID NO: 45434 - protein, 10 aa, Artificial Sequence
  Description of Artificial Sequence: Synthetic epitope
SKASHISRGH

SEQ ID NO: 45435 - protein, 10 aa, Artificial Sequence
  Description of Artificial Sequence: Synthetic epitope
SKASKASDVR

SEQ ID NO: 45436 - protein, 10 aa, Artificial Sequence
  Description of Artificial Sequence: Synthetic epitope
SKASNSKQDY

SEQ ID NO: 45437 - protein, 10 aa, Artificial Sequence
  Description of Artificial Sequence: Synthetic epitope
SKASQLLARS

SEQ ID NO: 45438 - protein, 10 aa, Artificial Sequence
  Description of Artificial Sequence: Synthetic epitope
SKASQSETSV

SEQ ID NO: 45439 - protein, 10 aa, Artificial Sequence
  Description of Artificial Sequence: Synthetic epitope
SKASRVGAFK

SEQ ID NO: 45440 - protein, 10 aa, Artificial Sequence
  Description of Artificial Sequence: Synthetic epitope
SKASSQVNVE

SEQ ID NO: 45441 - protein, 10 aa, Artificial Sequence
  Description of Artificial Sequence: Synthetic epitope
SKATASSPTQ

SEQ ID NO: 45442 - protein, 10 aa, Artificial Sequence
  Description of Artificial Sequence: Synthetic epitope
SKATVKARPS

SEQ ID NO: 45443 - protein, 10 aa, Artificial Sequence
  Description of Artificial Sequence: Synthetic epitope
SKAVASGQTQ

SEQ ID NO: 45444 - protein, 10 aa, Artificial Sequence
  Description of Artificial Sequence: Synthetic epitope
SKAVKLEPEL

SEQ ID NO: 45445 - protein, 10 aa, Artificial Sequence
  Description of Artificial Sequence: Synthetic epitope
SKDEAAVHQD

SEQ ID NO: 45446 - protein, 10 aa, Artificial Sequence
  Description of Artificial Sequence: Synthetic epitope
SKDEEQKPQQ

SEQ ID NO: 45447 - protein, 10 aa, Artificial Sequence
  Description of Artificial Sequence: Synthetic epitope
SKDHLQVEND

SEQ ID NO: 45448 - protein, 10 aa, Artificial Sequence
  Description of Artificial Sequence: Synthetic epitope
SKDKAIAEEK

SEQ ID NO: 45449 - protein, 10 aa, Artificial Sequence
  Description of Artificial Sequence: Synthetic epitope
SKDKEKNSSD

SEQ ID NO: 45450 - protein, 10 aa, Artificial Sequence
  Description of Artificial Sequence: Synthetic epitope
SKDQHAMGME

SEQ ID NO: 45451 - protein, 10 aa, Artificial Sequence
  Description of Artificial Sequence: Synthetic epitope
SKDQPDYAMY

SEQ ID NO: 45452 - protein, 10 aa, Artificial Sequence
  Description of Artificial Sequence: Synthetic epitope
SKDQTLLQAE

SEQ ID NO: 45453 - protein, 10 aa, Artificial Sequence
  Description of Artificial Sequence: Synthetic epitope
SKDQVLSEPE

SEQ ID NO: 45454 - protein, 10 aa, Artificial Sequence
  Description of Artificial Sequence: Synthetic epitope
SKDSENKAIF

SEQ ID NO: 45455 - protein, 10 aa, Artificial Sequence
  Description of Artificial Sequence: Synthetic epitope
SKDSIQKSLQ

SEQ ID NO: 45456 - protein, 10 aa, Artificial Sequence
  Description of Artificial Sequence: Synthetic epitope
SKDSRNADFM

SEQ ID NO: 45457 - protein, 10 aa, Artificial Sequence
  Description of Artificial Sequence: Synthetic epitope
SKDSSQSKII

SEQ ID NO: 45458 - protein, 10 aa, Artificial Sequence
  Description of Artificial Sequence: Synthetic epitope
SKDTVSSTMD

SEQ ID NO: 45459 - protein, 10 aa, Artificial Sequence
  Description of Artificial Sequence: Synthetic epitope
SKDVIKTIVQ

SEQ ID NO: 45460 - protein, 10 aa, Artificial Sequence
  Description of Artificial Sequence: Synthetic epitope
SKDVKLAEAH

SEQ ID NO: 45461 - protein, 10 aa, Artificial Sequence
  Description of Artificial Sequence: Synthetic epitope
SKDVQSLSLR

SEQ ID NO: 45462 - protein, 10 aa, Artificial Sequence
  Description of Artificial Sequence: Synthetic epitope
SKDWDSATLS

SEQ ID NO: 45463 - protein, 10 aa, Artificial Sequence
  Description of Artificial Sequence: Synthetic epitope
SKEAKALISR

SEQ ID NO: 45464 - protein, 10 aa, Artificial Sequence
  Description of Artificial Sequence: Synthetic epitope
SKEATADQGS

SEQ ID NO: 45465 - protein, 10 aa, Artificial Sequence
  Description of Artificial Sequence: Synthetic epitope
SKEDKEADYR

SEQ ID NO: 45466 - protein, 10 aa, Artificial Sequence
  Description of Artificial Sequence: Synthetic epitope
SKEDVTHDTR

SEQ ID NO: 45467 - protein, 10 aa, Artificial Sequence
  Description of Artificial Sequence: Synthetic epitope
SKEEAAKAQK

SEQ ID NO: 45468 - protein, 10 aa, Artificial Sequence
  Description of Artificial Sequence: Synthetic epitope
SKEELKKAQD

SEQ ID NO: 45469 - protein, 10 aa, Artificial Sequence
  Description of Artificial Sequence: Synthetic epitope
SKEHSESSVK

SEQ ID NO: 45470 - protein, 10 aa, Artificial Sequence
  Description of Artificial Sequence: Synthetic epitope
SKEKALLEEA

SEQ ID NO: 45471 - protein, 10 aa, Artificial Sequence
  Description of Artificial Sequence: Synthetic epitope
SKEKIQNLSL

SEQ ID NO: 45472 - protein, 10 aa, Artificial Sequence
  Description of Artificial Sequence: Synthetic epitope
SKEKLDSNSN

SEQ ID NO: 45473 - protein, 10 aa, Artificial Sequence
  Description of Artificial Sequence: Synthetic epitope
SKEKMEKTKV

SEQ ID NO: 45474 - protein, 10 aa, Artificial Sequence
  Description of Artificial Sequence: Synthetic epitope
SKEKSKYKFP

SEQ ID NO: 45475 - protein, 10 aa, Artificial Sequence
  Description of Artificial Sequence: Synthetic epitope
SKEKSSKAVH

SEQ ID NO: 45476 - protein, 10 aa, Artificial Sequence
  Description of Artificial Sequence: Synthetic epitope
SKEKSTFINM

SEQ ID NO: 45477 - protein, 10 aa, Artificial Sequence
  Description of Artificial Sequence: Synthetic epitope
SKEKTISVSS

SEQ ID NO: 45478 - protein, 10 aa, Artificial Sequence
  Description of Artificial Sequence: Synthetic epitope
SKELVGERQN

SEQ ID NO: 45479 - protein, 10 aa, Artificial Sequence
  Description of Artificial Sequence: Synthetic epitope
SKENENERFA

SEQ ID NO: 45480 - protein, 10 aa, Artificial Sequence
  Description of Artificial Sequence: Synthetic epitope
SKENSEQEKD

SEQ ID NO: 45481 - protein, 10 aa, Artificial Sequence
  Description of Artificial Sequence: Synthetic epitope
SKENVTKFRE

SEQ ID NO: 45482 - protein, 10 aa, Artificial Sequence
  Description of Artificial Sequence: Synthetic epitope
SKEPRRFASE

SEQ ID NO: 45483 - protein, 10 aa, Artificial Sequence
  Description of Artificial Sequence: Synthetic epitope
SKEQAKATLL

SEQ ID NO: 45484 - protein, 10 aa, Artificial Sequence
  Description of Artificial Sequence: Synthetic epitope
SKEQRSRGEV

SEQ ID NO: 45485 - protein, 10 aa, Artificial Sequence
  Description of Artificial Sequence: Synthetic epitope
SKERFDIAII

SEQ ID NO: 45486 - protein, 10 aa, Artificial Sequence
  Description of Artificial Sequence: Synthetic epitope
SKERVARTTS

SEQ ID NO: 45487 - protein, 10 aa, Artificial Sequence
  Description of Artificial Sequence: Synthetic epitope
SKESASRVEE

SEQ ID NO: 45488 - protein, 10 aa, Artificial Sequence
  Description of Artificial Sequence: Synthetic epitope
SKESATLQPF

SEQ ID NO: 45489 - protein, 10 aa, Artificial Sequence
  Description of Artificial Sequence: Synthetic epitope
SKESKAEQAE

SEQ ID NO: 45490 - protein, 10 aa, Artificial Sequence
  Description of Artificial Sequence: Synthetic epitope
SKESRSSKLH

SEQ ID NO: 45491 - protein, 10 aa, Artificial Sequence
  Description of Artificial Sequence: Synthetic epitope
SKESRTNVRI

SEQ ID NO: 45492 - protein, 10 aa, Artificial Sequence
  Description of Artificial Sequence: Synthetic epitope
SKESSKKPKE

SEQ ID NO: 45493 - protein, 10 aa, Artificial Sequence
  Description of Artificial Sequence: Synthetic epitope
SKESVRAPVE

SEQ ID NO: 45494 - protein, 10 aa, Artificial Sequence
  Description of Artificial Sequence: Synthetic epitope
SKETIQVKQI

SEQ ID NO: 45495 - protein, 10 aa, Artificial Sequence
  Description of Artificial Sequence: Synthetic epitope
SKEVSVDVAS

SEQ ID NO: 45496 - protein, 10 aa, Artificial Sequence
  Description of Artificial Sequence: Synthetic epitope
SKEVTEETIS

SEQ ID NO: 45497 - protein, 10 aa, Artificial Sequence
  Description of Artificial Sequence: Synthetic epitope
SKFAISLPKA

SEQ ID NO: 45498 - protein, 10 aa, Artificial Sequence
  Description of Artificial Sequence: Synthetic epitope
SKFIIVTGQI

SEQ ID NO: 45499 - protein, 10 aa, Artificial Sequence
  Description of Artificial Sequence: Synthetic epitope
SKFIIVTGQI

SEQ ID NO: 45500 - protein, 10 aa, Artificial Sequence
  Description of Artificial Sequence: Synthetic epitope
SKFKRKDWSL

SEQ ID NO: 45501 - protein, 10 aa, Artificial Sequence
  Description of Artificial Sequence: Synthetic epitope
SKFLRVSTKI

SEQ ID NO: 45502 - protein, 10 aa, Artificial Sequence
  Description of Artificial Sequence: Synthetic epitope
SKFLSASPMA

SEQ ID NO: 45503 - protein, 10 aa, Artificial Sequence
  Description of Artificial Sequence: Synthetic epitope
SKFRLSKIWS

SEQ ID NO: 45504 - protein, 10 aa, Artificial Sequence
  Description of Artificial Sequence: Synthetic epitope
SKFRSSLYLL

SEQ ID NO: 45505 - protein, 10 aa, Artificial Sequence
  Description of Artificial Sequence: Synthetic epitope
SKFSPMSYPQ

SEQ ID NO: 45506 - protein, 10 aa, Artificial Sequence
  Description of Artificial Sequence: Synthetic epitope
SKGAEKGLQN

SEQ ID NO: 45507 - protein, 10 aa, Artificial Sequence
  Description of Artificial Sequence: Synthetic epitope
SKGIEPSSEG

SEQ ID NO: 45508 - protein, 10 aa, Artificial Sequence
  Description of Artificial Sequence: Synthetic epitope
SKGKDTKKLI

SEQ ID NO: 45509 - protein, 10 aa, Artificial Sequence
  Description of Artificial Sequence: Synthetic epitope
SKGKGNANLE

SEQ ID NO: 45510 - protein, 10 aa, Artificial Sequence
  Description of Artificial Sequence: Synthetic epitope
SKGLDIESTS

SEQ ID NO: 45511 - protein, 10 aa, Artificial Sequence
  Description of Artificial Sequence: Synthetic epitope
SKGLESNESL

SEQ ID NO: 45512 - protein, 10 aa, Artificial Sequence
  Description of Artificial Sequence: Synthetic epitope
SKGLQRELRA

SEQ ID NO: 45513 - protein, 10 aa, Artificial Sequence
  Description of Artificial Sequence: Synthetic epitope
SKGLSLTAIH

SEQ ID NO: 45514 - protein, 10 aa, Artificial Sequence
  Description of Artificial Sequence: Synthetic epitope
SKGNSKKNKS

SEQ ID NO: 45515 - protein, 10 aa, Artificial Sequence
  Description of Artificial Sequence: Synthetic epitope
SKGPKKTAKS

SEQ ID NO: 45516 - protein, 10 aa, Artificial Sequence
  Description of Artificial Sequence: Synthetic epitope
SKGQAEVDAM

SEQ ID NO: 45517 - protein, 10 aa, Artificial Sequence
  Description of Artificial Sequence: Synthetic epitope
SKGQANESKT

SEQ ID NO: 45518 - protein, 10 aa, Artificial Sequence
  Description of Artificial Sequence: Synthetic epitope
SKGQTKLLQL

SEQ ID NO: 45519 - protein, 10 aa, Artificial Sequence
  Description of Artificial Sequence: Synthetic epitope
SKGQVAKKED

SEQ ID NO: 45520 - protein, 10 aa, Artificial Sequence
  Description of Artificial Sequence: Synthetic epitope
SKGRTRREQA

SEQ ID NO: 45521 - protein, 10 aa, Artificial Sequence
  Description of Artificial Sequence: Synthetic epitope
SKGSRKSVLE

SEQ ID NO: 45522 - protein, 10 aa, Artificial Sequence
  Description of Artificial Sequence: Synthetic epitope
SKGSYRYAPM

SEQ ID NO: 45523 - protein, 10 aa, Artificial Sequence
  Description of Artificial Sequence: Synthetic epitope
SKGTKELEVN

SEQ ID NO: 45524 - protein, 10 aa, Artificial Sequence
  Description of Artificial Sequence: Synthetic epitope
SKGTLSKEMN

SEQ ID NO: 45525 - protein, 10 aa, Artificial Sequence
  Description of Artificial Sequence: Synthetic epitope
SKGTSSLSQQ

SEQ ID NO: 45526 - protein, 10 aa, Artificial Sequence
  Description of Artificial Sequence: Synthetic epitope
SKGVIQVAGI

SEQ ID NO: 45527 - protein, 10 aa, Artificial Sequence
  Description of Artificial Sequence: Synthetic epitope
SKHDKSSTEE

SEQ ID NO: 45528 - protein, 10 aa, Artificial Sequence
  Description of Artificial Sequence: Synthetic epitope
SKHESEYNTT

SEQ ID NO: 45529 - protein, 10 aa, Artificial Sequence
  Description of Artificial Sequence: Synthetic epitope
SKHFQQAKMI

SEQ ID NO: 45530 - protein, 10 aa, Artificial Sequence
  Description of Artificial Sequence: Synthetic epitope
SKHKSKKGQA

SEQ ID NO: 45531 - protein, 10 aa, Artificial Sequence
  Description of Artificial Sequence: Synthetic epitope
SKHSNSEHKD

SEQ ID NO: 45532 - protein, 10 aa, Artificial Sequence
  Description of Artificial Sequence: Synthetic epitope
SKHSQDTQPL

SEQ ID NO: 45533 - protein, 10 aa, Artificial Sequence
  Description of Artificial Sequence: Synthetic epitope
SKHVRNWVPK

SEQ ID NO: 45534 - protein, 10 aa, Artificial Sequence
  Description of Artificial Sequence: Synthetic epitope
SKIAASGGEV

SEQ ID NO: 45535 - protein, 10 aa, Artificial Sequence
  Description of Artificial Sequence: Synthetic epitope
SKIEFYISES

SEQ ID NO: 45536 - protein, 10 aa, Artificial Sequence
  Description of Artificial Sequence: Synthetic epitope
SKIESNLSQP

SEQ ID NO: 45537 - protein, 10 aa, Artificial Sequence
  Description of Artificial Sequence: Synthetic epitope
SKIETIESTA

SEQ ID NO: 45538 - protein, 10 aa, Artificial Sequence
  Description of Artificial Sequence: Synthetic epitope
SKIGSFAEPS

SEQ ID NO: 45539 - protein, 10 aa, Artificial Sequence
  Description of Artificial Sequence: Synthetic epitope
SKIIMLRNDI

SEQ ID NO: 45540 - protein, 10 aa, Artificial Sequence
  Description of Artificial Sequence: Synthetic epitope
SKIKKQANDL

SEQ ID NO: 45541 - protein, 10 aa, Artificial Sequence
  Description of Artificial Sequence: Synthetic epitope
SKILASTADS

SEQ ID NO: 45542 - protein, 10 aa, Artificial Sequence
  Description of Artificial Sequence: Synthetic epitope
SKILDREVET

SEQ ID NO: 45543 - protein, 10 aa, Artificial Sequence
  Description of Artificial Sequence: Synthetic epitope
SKILMIKKEH

SEQ ID NO: 45544 - protein, 10 aa, Artificial Sequence
  Description of Artificial Sequence: Synthetic epitope
SKIMEKRPEE

SEQ ID NO: 45545 - protein, 10 aa, Artificial Sequence
  Description of Artificial Sequence: Synthetic epitope
SKIRAPTTMK

SEQ ID NO: 45546 - protein, 10 aa, Artificial Sequence
  Description of Artificial Sequence: Synthetic epitope
SKIRVVRKSI

SEQ ID NO: 45547 - protein, 10 aa, Artificial Sequence
  Description of Artificial Sequence: Synthetic epitope
SKISEHVVLT

SEQ ID NO: 45548 - protein, 10 aa, Artificial Sequence
  Description of Artificial Sequence: Synthetic epitope
SKISQNGQQS

SEQ ID NO: 45549 - protein, 10 aa, Artificial Sequence
  Description of Artificial Sequence: Synthetic epitope
SKITKQSFKE

SEQ ID NO: 45550 - protein, 10 aa, Artificial Sequence
  Description of Artificial Sequence: Synthetic epitope
SKITQDLMAK

SEQ ID NO: 45551 - protein, 10 aa, Artificial Sequence
  Description of Artificial Sequence: Synthetic epitope
SKITVTSEVP

SEQ ID NO: 45552 - protein, 10 aa, Artificial Sequence
  Description of Artificial Sequence: Synthetic epitope
SKIVTLGKDE

SEQ ID NO: 45553 - protein, 10 aa, Artificial Sequence
  Description of Artificial Sequence: Synthetic epitope
SKKAADSTSQ

SEQ ID NO: 45554 - protein, 10 aa, Artificial Sequence
  Description of Artificial Sequence: Synthetic epitope
SKKAKRSPSG

SEQ ID NO: 45555 - protein, 10 aa, Artificial Sequence
  Description of Artificial Sequence: Synthetic epitope
SKKALASDRS

SEQ ID NO: 45556 - protein, 10 aa, Artificial Sequence
  Description of Artificial Sequence: Synthetic epitope
SKKAMQIQEQ

SEQ ID NO: 45557 - protein, 10 aa, Artificial Sequence
  Description of Artificial Sequence: Synthetic epitope
SKKANQQLNF

SEQ ID NO: 45558 - protein, 10 aa, Artificial Sequence
  Description of Artificial Sequence: Synthetic epitope
SKKAPSQKES

SEQ ID NO: 45559 - protein, 10 aa, Artificial Sequence
  Description of Artificial Sequence: Synthetic epitope
SKKDLPLDSE

SEQ ID NO: 45560 - protein, 10 aa, Artificial Sequence
  Description of Artificial Sequence: Synthetic epitope
SKKEASMKKV

SEQ ID NO: 45561 - protein, 10 aa, Artificial Sequence
  Description of Artificial Sequence: Synthetic epitope
SKKEEKRSTS

SEQ ID NO: 45562 - protein, 10 aa, Artificial Sequence
  Description of Artificial Sequence: Synthetic epitope
SKKEGKVVKS

SEQ ID NO: 45563 - protein, 10 aa, Artificial Sequence
  Description of Artificial Sequence: Synthetic epitope
SKKEGKVVKS

SEQ ID NO: 45564 - protein, 10 aa, Artificial Sequence
  Description of Artificial Sequence: Synthetic epitope
SKKEINALAE

SEQ ID NO: 45565 - protein, 10 aa, Artificial Sequence
  Description of Artificial Sequence: Synthetic epitope
SKKERIQLEE

SEQ ID NO: 45566 - protein, 10 aa, Artificial Sequence
  Description of Artificial Sequence: Synthetic epitope
SKKESVSSLQ

SEQ ID NO: 45567 - protein, 10 aa, Artificial Sequence
  Description of Artificial Sequence: Synthetic epitope
SKKFKEMEDT

SEQ ID NO: 45568 - protein, 10 aa, Artificial Sequence
  Description of Artificial Sequence: Synthetic epitope
SKKFQGKIAK

SEQ ID NO: 45569 - protein, 10 aa, Artificial Sequence
  Description of Artificial Sequence: Synthetic epitope
SKKGQHNKKF

SEQ ID NO: 45570 - protein, 10 aa, Artificial Sequence
  Description of Artificial Sequence: Synthetic epitope
SKKHRRLAQD

SEQ ID NO: 45571 - protein, 10 aa, Artificial Sequence
  Description of Artificial Sequence: Synthetic epitope
SKKIFFNSLS

SEQ ID NO: 45572 - protein, 10 aa, Artificial Sequence
  Description of Artificial Sequence: Synthetic epitope
SKKIIESIIE

SEQ ID NO: 45573 - protein, 10 aa, Artificial Sequence
  Description of Artificial Sequence: Synthetic epitope
SKKIKPNNPK

SEQ ID NO: 45574 - protein, 10 aa, Artificial Sequence
  Description of Artificial Sequence: Synthetic epitope
SKKISRKPLA

SEQ ID NO: 45575 - protein, 10 aa, Artificial Sequence
  Description of Artificial Sequence: Synthetic epitope
SKKLGKLKGI

SEQ ID NO: 45576 - protein, 10 aa, Artificial Sequence
  Description of Artificial Sequence: Synthetic epitope
SKKLNVTEQE

SEQ ID NO: 45577 - protein, 10 aa, Artificial Sequence
  Description of Artificial Sequence: Synthetic epitope
SKKLTEETQE

SEQ ID NO: 45578 - protein, 10 aa, Artificial Sequence
  Description of Artificial Sequence: Synthetic epitope
SKKLVKTLVA

SEQ ID NO: 45579 - protein, 10 aa, Artificial Sequence
  Description of Artificial Sequence: Synthetic epitope
SKKLVNSVAG

SEQ ID NO: 45580 - protein, 10 aa, Artificial Sequence
  Description of Artificial Sequence: Synthetic epitope
SKKMELLEDA

SEQ ID NO: 45581 - protein, 10 aa, Artificial Sequence
  Description of Artificial Sequence: Synthetic epitope
SKKQKRSHKA

SEQ ID NO: 45582 - protein, 10 aa, Artificial Sequence
  Description of Artificial Sequence: Synthetic epitope
SKKQNVSTSN

SEQ ID NO: 45583 - protein, 10 aa, Artificial Sequence
  Description of Artificial Sequence: Synthetic epitope
SKKQREISKT

SEQ ID NO: 45584 - protein, 10 aa, Artificial Sequence
  Description of Artificial Sequence: Synthetic epitope
SKKRARRMRP

SEQ ID NO: 45585 - protein, 10 aa, Artificial Sequence
  Description of Artificial Sequence: Synthetic epitope
SKKRLLKFES

SEQ ID NO: 45586 - protein, 10 aa, Artificial Sequence
  Description of Artificial Sequence: Synthetic epitope
SKKSASERPI

SEQ ID NO: 45587 - protein, 10 aa, Artificial Sequence
  Description of Artificial Sequence: Synthetic epitope
SKKSEIKEIE

SEQ ID NO: 45588 - protein, 10 aa, Artificial Sequence
  Description of Artificial Sequence: Synthetic epitope
SKKSELWTAQ

SEQ ID NO: 45589 - protein, 10 aa, Artificial Sequence
  Description of Artificial Sequence: Synthetic epitope
SKKSHGQHTS

SEQ ID NO: 45590 - protein, 10 aa, Artificial Sequence
  Description of Artificial Sequence: Synthetic epitope
SKKSHQIEEL

SEQ ID NO: 45591 - protein, 10 aa, Artificial Sequence
  Description of Artificial Sequence: Synthetic epitope
SKKSRTRQMN

SEQ ID NO: 45592 - protein, 10 aa, Artificial Sequence
  Description of Artificial Sequence: Synthetic epitope
SKKSSKKANT

SEQ ID NO: 45593 - protein, 10 aa, Artificial Sequence
  Description of Artificial Sequence: Synthetic epitope
SKKSTREAGS

SEQ ID NO: 45594 - protein, 10 aa, Artificial Sequence
  Description of Artificial Sequence: Synthetic epitope
SKKSVARIGQ

SEQ ID NO: 45595 - protein, 10 aa, Artificial Sequence
  Description of Artificial Sequence: Synthetic epitope
SKKSVSYMVS

SEQ ID NO: 45596 - protein, 10 aa, Artificial Sequence
  Description of Artificial Sequence: Synthetic epitope
SKKSVVWENK

SEQ ID NO: 45597 - protein, 10 aa, Artificial Sequence
  Description of Artificial Sequence: Synthetic epitope
SKKTGEKSSG

SEQ ID NO: 45598 - protein, 10 aa, Artificial Sequence
  Description of Artificial Sequence: Synthetic epitope
SKKTSKAEKE

SEQ ID NO: 45599 - protein, 10 aa, Artificial Sequence
  Description of Artificial Sequence: Synthetic epitope
SKKTSKTVTI

SEQ ID NO: 45600 - protein, 10 aa, Artificial Sequence
  Description of Artificial Sequence: Synthetic epitope
SKKTTALDQL

SEQ ID NO: 45601 - protein, 10 aa, Artificial Sequence
  Description of Artificial Sequence: Synthetic epitope
SKKVEFTTGA

SEQ ID NO: 45602 - protein, 10 aa, Artificial Sequence
  Description of Artificial Sequence: Synthetic epitope
SKKVRVKLGN

SEQ ID NO: 45603 - protein, 10 aa, Artificial Sequence
  Description of Artificial Sequence: Synthetic epitope
SKKVSERSLT

SEQ ID NO: 45604 - protein, 10 aa, Artificial Sequence
  Description of Artificial Sequence: Synthetic epitope
SKKVTIDFAG

SEQ ID NO: 45605 - protein, 10 aa, Artificial Sequence
  Description of Artificial Sequence: Synthetic epitope
SKKYKLSEIH

SEQ ID NO: 45606 - protein, 10 aa, Artificial Sequence
  Description of Artificial Sequence: Synthetic epitope
SKLAKDSNTI

SEQ ID NO: 45607 - protein, 10 aa, Artificial Sequence
  Description of Artificial Sequence: Synthetic epitope
SKLAKHHSST

SEQ ID NO: 45608 - protein, 10 aa, Artificial Sequence
  Description of Artificial Sequence: Synthetic epitope
SKLAQLTLEQ

SEQ ID NO: 45609 - protein, 10 aa, Artificial Sequence
  Description of Artificial Sequence: Synthetic epitope
SKLATRLYVE

SEQ ID NO: 45610 - protein, 10 aa, Artificial Sequence
  Description of Artificial Sequence: Synthetic epitope
SKLEESSKAT

SEQ ID NO: 45611 - protein, 10 aa, Artificial Sequence
  Description of Artificial Sequence: Synthetic epitope
SKLEGTTDPG

SEQ ID NO: 45612 - protein, 10 aa, Artificial Sequence
  Description of Artificial Sequence: Synthetic epitope
SKLEISTSSL

SEQ ID NO: 45613 - protein, 10 aa, Artificial Sequence
  Description of Artificial Sequence: Synthetic epitope
SKLESEMTKK

SEQ ID NO: 45614 - protein, 10 aa, Artificial Sequence
  Description of Artificial Sequence: Synthetic epitope
SKLFSSVTFE

SEQ ID NO: 45615 - protein, 10 aa, Artificial Sequence
  Description of Artificial Sequence: Synthetic epitope
SKLGIKATSV

SEQ ID NO: 45616 - protein, 10 aa, Artificial Sequence
  Description of Artificial Sequence: Synthetic epitope
SKLGSDAQVK

SEQ ID NO: 45617 - protein, 10 aa, Artificial Sequence
  Description of Artificial Sequence: Synthetic epitope
SKLHATTSTA

SEQ ID NO: 45618 - protein, 10 aa, Artificial Sequence
  Description of Artificial Sequence: Synthetic epitope
SKLISVSKHT

SEQ ID NO: 45619 - protein, 10 aa, Artificial Sequence
  Description of Artificial Sequence: Synthetic epitope
SKLKAFLELR

SEQ ID NO: 45620 - protein, 10 aa, Artificial Sequence
  Description of Artificial Sequence: Synthetic epitope
SKLKKRALKL

SEQ ID NO: 45621 - protein, 10 aa, Artificial Sequence
  Description of Artificial Sequence: Synthetic epitope
SKLKKSKRGS

SEQ ID NO: 45622 - protein, 10 aa, Artificial Sequence
  Description of Artificial Sequence: Synthetic epitope
SKLKKVLTSK

SEQ ID NO: 45623 - protein, 10 aa, Artificial Sequence
  Description of Artificial Sequence: Synthetic epitope
SKLKQASLRV

SEQ ID NO: 45624 - protein, 10 aa, Artificial Sequence
  Description of Artificial Sequence: Synthetic epitope
SKLKSQHQED

SEQ ID NO: 45625 - protein, 10 aa, Artificial Sequence
  Description of Artificial Sequence: Synthetic epitope
SKLKSTPMQG

SEQ ID NO: 45626 - protein, 10 aa, Artificial Sequence
  Description of Artificial Sequence: Synthetic epitope
SKLLNESETK

SEQ ID NO: 45627 - protein, 10 aa, Artificial Sequence
  Description of Artificial Sequence: Synthetic epitope
SKLLSSFMFT

SEQ ID NO: 45628 - protein, 10 aa, Artificial Sequence
  Description of Artificial Sequence: Synthetic epitope
SKLLSSQAQS

SEQ ID NO: 45629 - protein, 10 aa, Artificial Sequence
  Description of Artificial Sequence: Synthetic epitope
SKLMASKSSA

SEQ ID NO: 45630 - protein, 10 aa, Artificial Sequence
  Description of Artificial Sequence: Synthetic epitope
SKLMDQLEAL

SEQ ID NO: 45631 - protein, 10 aa, Artificial Sequence
  Description of Artificial Sequence: Synthetic epitope
SKLMELDAAV

SEQ ID NO: 45632 - protein, 10 aa, Artificial Sequence
  Description of Artificial Sequence: Synthetic epitope
SKLMKILQPQ

SEQ ID NO: 45633 - protein, 10 aa, Artificial Sequence
  Description of Artificial Sequence: Synthetic epitope
SKLNTSKQAE

SEQ ID NO: 45634 - protein, 10 aa, Artificial Sequence
  Description of Artificial Sequence: Synthetic epitope
SKLNTYALQV

SEQ ID NO: 45635 - protein, 10 aa, Artificial Sequence
  Description of Artificial Sequence: Synthetic epitope
SKLPHSQSSP

SEQ ID NO: 45636 - protein, 10 aa, Artificial Sequence
  Description of Artificial Sequence: Synthetic epitope
SKLPSRLEGG

SEQ ID NO: 45637 - protein, 10 aa, Artificial Sequence
  Description of Artificial Sequence: Synthetic epitope
SKLQDQVKMQ

SEQ ID NO: 45638 - protein, 10 aa, Artificial Sequence
  Description of Artificial Sequence: Synthetic epitope
SKLQLSSTSF

SEQ ID NO: 45639 - protein, 10 aa, Artificial Sequence
  Description of Artificial Sequence: Synthetic epitope
SKLQQAAQQH

SEQ ID NO: 45640 - protein, 10 aa, Artificial Sequence
  Description of Artificial Sequence: Synthetic epitope
SKLQTWSSFT

SEQ ID NO: 45641 - protein, 10 aa, Artificial Sequence
  Description of Artificial Sequence: Synthetic epitope
SKLRGAVAAE

SEQ ID NO: 45642 - protein, 10 aa, Artificial Sequence
  Description of Artificial Sequence: Synthetic epitope
SKLSAALSSL

SEQ ID NO: 45643 - protein, 10 aa, Artificial Sequence
  Description of Artificial Sequence: Synthetic epitope
SKLSASALKY

SEQ ID NO: 45644 - protein, 10 aa, Artificial Sequence
  Description of Artificial Sequence: Synthetic epitope
SKLSFSQVFK

SEQ ID NO: 45645 - protein, 10 aa, Artificial Sequence
  Description of Artificial Sequence: Synthetic epitope
SKLSKTEEYS

SEQ ID NO: 45646 - protein, 10 aa, Artificial Sequence
  Description of Artificial Sequence: Synthetic epitope
SKLSMSKALP

SEQ ID NO: 45647 - protein, 10 aa, Artificial Sequence
  Description of Artificial Sequence: Synthetic epitope
SKLSQSKHLK

SEQ ID NO: 45648 - protein, 10 aa, Artificial Sequence
  Description of Artificial Sequence: Synthetic epitope
SKLSTEQINS

SEQ ID NO: 45649 - protein, 10 aa, Artificial Sequence
  Description of Artificial Sequence: Synthetic epitope
SKLSTLVETT

SEQ ID NO: 45650 - protein, 10 aa, Artificial Sequence
  Description of Artificial Sequence: Synthetic epitope
SKLTRAETVF

SEQ ID NO: 45651 - protein, 10 aa, Artificial Sequence
  Description of Artificial Sequence: Synthetic epitope
SKLVSEKVDD

SEQ ID NO: 45652 - protein, 10 aa, Artificial Sequence
  Description of Artificial Sequence: Synthetic epitope
SKLYPEKNVM

SEQ ID NO: 45653 - protein, 10 aa, Artificial Sequence
  Description of Artificial Sequence: Synthetic epitope
SKMHTETIKP

SEQ ID NO: 45654 - protein, 10 aa, Artificial Sequence
  Description of Artificial Sequence: Synthetic epitope
SKMIAQIESS

SEQ ID NO: 45655 - protein, 10 aa, Artificial Sequence
  Description of Artificial Sequence: Synthetic epitope
SKMLSALQHL

SEQ ID NO: 45656 - protein, 10 aa, Artificial Sequence
  Description of Artificial Sequence: Synthetic epitope
SKMLSASGDP

SEQ ID NO: 45657 - protein, 10 aa, Artificial Sequence
  Description of Artificial Sequence: Synthetic epitope
SKMNFKLTGK

SEQ ID NO: 45658 - protein, 10 aa, Artificial Sequence
  Description of Artificial Sequence: Synthetic epitope
SKMNFKLTGK

SEQ ID NO: 45659 - protein, 10 aa, Artificial Sequence
  Description of Artificial Sequence: Synthetic epitope
SKMPAASKSS

SEQ ID NO: 45660 - protein, 10 aa, Artificial Sequence
  Description of Artificial Sequence: Synthetic epitope
SKMQQAETLS

SEQ ID NO: 45661 - protein, 10 aa, Artificial Sequence
  Description of Artificial Sequence: Synthetic epitope
SKMRVVLRVE

SEQ ID NO: 45662 - protein, 10 aa, Artificial Sequence
  Description of Artificial Sequence: Synthetic epitope
SKMSASQVKD

SEQ ID NO: 45663 - protein, 10 aa, Artificial Sequence
  Description of Artificial Sequence: Synthetic epitope
SKMSESKDQE

SEQ ID NO: 45664 - protein, 10 aa, Artificial Sequence
  Description of Artificial Sequence: Synthetic epitope
SKMSPLDMKD

SEQ ID NO: 45665 - protein, 10 aa, Artificial Sequence
  Description of Artificial Sequence: Synthetic epitope
SKMSRIFNPH

SEQ ID NO: 45666 - protein, 10 aa, Artificial Sequence
  Description of Artificial Sequence: Synthetic epitope
SKMSSVSNKP

SEQ ID NO: 45667 - protein, 10 aa, Artificial Sequence
  Description of Artificial Sequence: Synthetic epitope
SKMSSVYLKE

SEQ ID NO: 45668 - protein, 10 aa, Artificial Sequence
  Description of Artificial Sequence: Synthetic epitope
SKNAATTLKN

SEQ ID NO: 45669 - protein, 10 aa, Artificial Sequence
  Description of Artificial Sequence: Synthetic epitope
SKNAIGVYGI

SEQ ID NO: 45670 - protein, 10 aa, Artificial Sequence
  Description of Artificial Sequence: Synthetic epitope
SKNALQYRGN

SEQ ID NO: 45671 - protein, 10 aa, Artificial Sequence
  Description of Artificial Sequence: Synthetic epitope
SKNETVSSNS

SEQ ID NO: 45672 - protein, 10 aa, Artificial Sequence
  Description of Artificial Sequence: Synthetic epitope
SKNGEADSSD

SEQ ID NO: 45673 - protein, 10 aa, Artificial Sequence
  Description of Artificial Sequence: Synthetic epitope
SKNGKTKKGN

SEQ ID NO: 45674 - protein, 10 aa, Artificial Sequence
  Description of Artificial Sequence: Synthetic epitope
SKNKLDSGIE

SEQ ID NO: 45675 - protein, 10 aa, Artificial Sequence
  Description of Artificial Sequence: Synthetic epitope
SKNLAVQAQK

SEQ ID NO: 45676 - protein, 10 aa, Artificial Sequence
  Description of Artificial Sequence: Synthetic epitope
SKNLRSISTS

SEQ ID NO: 45677 - protein, 10 aa, Artificial Sequence
  Description of Artificial Sequence: Synthetic epitope
SKNMLEKVVL

SEQ ID NO: 45678 - protein, 10 aa, Artificial Sequence
  Description of Artificial Sequence: Synthetic epitope
SKNMTNDKNS

SEQ ID NO: 45679 - protein, 10 aa, Artificial Sequence
  Description of Artificial Sequence: Synthetic epitope
SKNNIKNGDS

SEQ ID NO: 45680 - protein, 10 aa, Artificial Sequence
  Description of Artificial Sequence: Synthetic epitope
SKNQGSELSG

SEQ ID NO: 45681 - protein, 10 aa, Artificial Sequence
  Description of Artificial Sequence: Synthetic epitope
SKNSASSEKG

SEQ ID NO: 45682 - protein, 10 aa, Artificial Sequence
  Description of Artificial Sequence: Synthetic epitope
SKNSEDDELA

SEQ ID NO: 45683 - protein, 10 aa, Artificial Sequence
  Description of Artificial Sequence: Synthetic epitope
SKNSKLLSTS

SEQ ID NO: 45684 - protein, 10 aa, Artificial Sequence
  Description of Artificial Sequence: Synthetic epitope
SKNSKYNAES

SEQ ID NO: 45685 - protein, 10 aa, Artificial Sequence
  Description of Artificial Sequence: Synthetic epitope
SKNTEKSTGG

SEQ ID NO: 45686 - protein, 10 aa, Artificial Sequence
  Description of Artificial Sequence: Synthetic epitope
SKNYKNASGV

SEQ ID NO: 45687 - protein, 10 aa, Artificial Sequence
  Description of Artificial Sequence: Synthetic epitope
SKPEKAQAMA

SEQ ID NO: 45688 - protein, 10 aa, Artificial Sequence
  Description of Artificial Sequence: Synthetic epitope
SKPGLSTSIP

SEQ ID NO: 45689 - protein, 10 aa, Artificial Sequence
  Description of Artificial Sequence: Synthetic epitope
SKPHGVSMKH

SEQ ID NO: 45690 - protein, 10 aa, Artificial Sequence
  Description of Artificial Sequence: Synthetic epitope
SKPITLDTTD

SEQ ID NO: 45691 - protein, 10 aa, Artificial Sequence
  Description of Artificial Sequence: Synthetic epitope
SKPQDTADKD

SEQ ID NO: 45692 - protein, 10 aa, Artificial Sequence
  Description of Artificial Sequence: Synthetic epitope
SKPQIAALKE

SEQ ID NO: 45693 - protein, 10 aa, Artificial Sequence
  Description of Artificial Sequence: Synthetic epitope
SKPQVDMRKH

SEQ ID NO: 45694 - protein, 10 aa, Artificial Sequence
  Description of Artificial Sequence: Synthetic epitope
SKPRKLVNTI

SEQ ID NO: 45695 - protein, 10 aa, Artificial Sequence
  Description of Artificial Sequence: Synthetic epitope
SKPSQIRDNT

SEQ ID NO: 45696 - protein, 10 aa, Artificial Sequence
  Description of Artificial Sequence: Synthetic epitope
SKPTTFPTSD

SEQ ID NO: 45697 - protein, 10 aa, Artificial Sequence
  Description of Artificial Sequence: Synthetic epitope
SKPTTKSQKT

SEQ ID NO: 45698 - protein, 10 aa, Artificial Sequence
  Description of Artificial Sequence: Synthetic epitope
SKPVLTTKVL

SEQ ID NO: 45699 - protein, 10 aa, Artificial Sequence
  Description of Artificial Sequence: Synthetic epitope
SKQAALIPSD

SEQ ID NO: 45700 - protein, 10 aa, Artificial Sequence
  Description of Artificial Sequence: Synthetic epitope
SKQAALLGNE

SEQ ID NO: 45701 - protein, 10 aa, Artificial Sequence
  Description of Artificial Sequence: Synthetic epitope
SKQDDSQSSN

SEQ ID NO: 45702 - protein, 10 aa, Artificial Sequence
  Description of Artificial Sequence: Synthetic epitope
SKQDWTIQWP

SEQ ID NO: 45703 - protein, 10 aa, Artificial Sequence
  Description of Artificial Sequence: Synthetic epitope
SKQEMASASS

SEQ ID NO: 45704 - protein, 10 aa, Artificial Sequence
  Description of Artificial Sequence: Synthetic epitope
SKQEQSAKAT

SEQ ID NO: 45705 - protein, 10 aa, Artificial Sequence
  Description of Artificial Sequence: Synthetic epitope
SKQETIMRHH

SEQ ID NO: 45706 - protein, 10 aa, Artificial Sequence
  Description of Artificial Sequence: Synthetic epitope
SKQFQSSAAV

SEQ ID NO: 45707 - protein, 10 aa, Artificial Sequence
  Description of Artificial Sequence: Synthetic epitope
SKQFRSAKLE

SEQ ID NO: 45708 - protein, 10 aa, Artificial Sequence
  Description of Artificial Sequence: Synthetic epitope
SKQHGKKDSK

SEQ ID NO: 45709 - protein, 10 aa, Artificial Sequence
  Description of Artificial Sequence: Synthetic epitope
SKQIEGNKKY

SEQ ID NO: 45710 - protein, 10 aa, Artificial Sequence
  Description of Artificial Sequence: Synthetic epitope
SKQISKLSEE

SEQ ID NO: 45711 - protein, 10 aa, Artificial Sequence
  Description of Artificial Sequence: Synthetic epitope
SKQKILLSQA

SEQ ID NO: 45712 - protein, 10 aa, Artificial Sequence
  Description of Artificial Sequence: Synthetic epitope
SKQKNIKGVK

SEQ ID NO: 45713 - protein, 10 aa, Artificial Sequence
  Description of Artificial Sequence: Synthetic epitope
SKQKNPDVRN

SEQ ID NO: 45714 - protein, 10 aa, Artificial Sequence
  Description of Artificial Sequence: Synthetic epitope
SKQLSLNAQE

SEQ ID NO: 45715 - protein, 10 aa, Artificial Sequence
  Description of Artificial Sequence: Synthetic epitope
SKQLVNVAER

SEQ ID NO: 45716 - protein, 10 aa, Artificial Sequence
  Description of Artificial Sequence: Synthetic epitope
SKQNATKLSA

SEQ ID NO: 45717 - protein, 10 aa, Artificial Sequence
  Description of Artificial Sequence: Synthetic epitope
SKQNQTTAIS

SEQ ID NO: 45718 - protein, 10 aa, Artificial Sequence
  Description of Artificial Sequence: Synthetic epitope
SKQNTVSYQD

SEQ ID NO: 45719 - protein, 10 aa, Artificial Sequence
  Description of Artificial Sequence: Synthetic epitope
SKQNVGVSNR

SEQ ID NO: 45720 - protein, 10 aa, Artificial Sequence
  Description of Artificial Sequence: Synthetic epitope
SKQPSEDPKN

SEQ ID NO: 45721 - protein, 10 aa, Artificial Sequence
  Description of Artificial Sequence: Synthetic epitope
SKQQASQVLV

SEQ ID NO: 45722 - protein, 10 aa, Artificial Sequence
  Description of Artificial Sequence: Synthetic epitope
SKQQKQKQAN

SEQ ID NO: 45723 - protein, 10 aa, Artificial Sequence
  Description of Artificial Sequence: Synthetic epitope
SKQRYASNAV

SEQ ID NO: 45724 - protein, 10 aa, Artificial Sequence
  Description of Artificial Sequence: Synthetic epitope
SKQSLQVLKK

SEQ ID NO: 45725 - protein, 10 aa, Artificial Sequence
  Description of Artificial Sequence: Synthetic epitope
SKQSSTESIT

SEQ ID NO: 45726 - protein, 10 aa, Artificial Sequence
  Description of Artificial Sequence: Synthetic epitope
SKQVATVKAD

SEQ ID NO: 45727 - protein, 10 aa, Artificial Sequence
  Description of Artificial Sequence: Synthetic epitope
SKQVISTGIQ

SEQ ID NO: 45728 - protein, 10 aa, Artificial Sequence
  Description of Artificial Sequence: Synthetic epitope
SKQVRASPSS

SEQ ID NO: 45729 - protein, 10 aa, Artificial Sequence
  Description of Artificial Sequence: Synthetic epitope
SKQYVEYQDQ

SEQ ID NO: 45730 - protein, 10 aa, Artificial Sequence
  Description of Artificial Sequence: Synthetic epitope
SKRAATLAQE

SEQ ID NO: 45731 - protein, 10 aa, Artificial Sequence
  Description of Artificial Sequence: Synthetic epitope
SKRALGNQKS

SEQ ID NO: 45732 - protein, 10 aa, Artificial Sequence
  Description of Artificial Sequence: Synthetic epitope
SKRDEKLDKK

SEQ ID NO: 45733 - protein, 10 aa, Artificial Sequence
  Description of Artificial Sequence: Synthetic epitope
SKRGGNSAQK

SEQ ID NO: 45734 - protein, 10 aa, Artificial Sequence
  Description of Artificial Sequence: Synthetic epitope
SKRGSVKEKE

SEQ ID NO: 45735 - protein, 10 aa, Artificial Sequence
  Description of Artificial Sequence: Synthetic epitope
SKRIREGVET

SEQ ID NO: 45736 - protein, 10 aa, Artificial Sequence
  Description of Artificial Sequence: Synthetic epitope
SKRKLIPKLS

SEQ ID NO: 45737 - protein, 10 aa, Artificial Sequence
  Description of Artificial Sequence: Synthetic epitope
SKRKNKIATR

SEQ ID NO: 45738 - protein, 10 aa, Artificial Sequence
  Description of Artificial Sequence: Synthetic epitope
SKRKSKSRSR

SEQ ID NO: 45739 - protein, 10 aa, Artificial Sequence
  Description of Artificial Sequence: Synthetic epitope
SKRKSMKSST

SEQ ID NO: 45740 - protein, 10 aa, Artificial Sequence
  Description of Artificial Sequence: Synthetic epitope
SKRKVLIGSQ

SEQ ID NO: 45741 - protein, 10 aa, Artificial Sequence
  Description of Artificial Sequence: Synthetic epitope
SKRLKVDGQK

SEQ ID NO: 45742 - protein, 10 aa, Artificial Sequence
  Description of Artificial Sequence: Synthetic epitope
SKRLTTDKAN

SEQ ID NO: 45743 - protein, 10 aa, Artificial Sequence
  Description of Artificial Sequence: Synthetic epitope
SKRPATADSP

SEQ ID NO: 45744 - protein, 10 aa, Artificial Sequence
  Description of Artificial Sequence: Synthetic epitope
SKRQSQDVKN

SEQ ID NO: 45745 - protein, 10 aa, Artificial Sequence
  Description of Artificial Sequence: Synthetic epitope
SKRQSRTSLQ

SEQ ID NO: 45746 - protein, 10 aa, Artificial Sequence
  Description of Artificial Sequence: Synthetic epitope
SKRREDSERS

SEQ ID NO: 45747 - protein, 10 aa, Artificial Sequence
  Description of Artificial Sequence: Synthetic epitope
SKRREKASEG

SEQ ID NO: 45748 - protein, 10 aa, Artificial Sequence
  Description of Artificial Sequence: Synthetic epitope
SKRSEQSMDM

SEQ ID NO: 45749 - protein, 10 aa, Artificial Sequence
  Description of Artificial Sequence: Synthetic epitope
SKRSKSSEHK

SEQ ID NO: 45750 - protein, 10 aa, Artificial Sequence
  Description of Artificial Sequence: Synthetic epitope
SKRSNTVVGN

SEQ ID NO: 45751 - protein, 10 aa, Artificial Sequence
  Description of Artificial Sequence: Synthetic epitope
SKRSRVMDAD

SEQ ID NO: 45752 - protein, 10 aa, Artificial Sequence
  Description of Artificial Sequence: Synthetic epitope
SKRSKKTRLA

SEQ ID NO: 45753 - protein, 10 aa, Artificial Sequence
  Description of Artificial Sequence: Synthetic epitope
SKSAALLHKE

SEQ ID NO: 45754 - protein, 10 aa, Artificial Sequence
  Description of Artificial Sequence: Synthetic epitope
SKSADIWRED

SEQ ID NO: 45755 - protein, 10 aa, Artificial Sequence
  Description of Artificial Sequence: Synthetic epitope
SKSAGATTSK

SEQ ID NO: 45756 - protein, 10 aa, Artificial Sequence
  Description of Artificial Sequence: Synthetic epitope
SKSASDLSED

SEQ ID NO: 45757 - protein, 10 aa, Artificial Sequence
  Description of Artificial Sequence: Synthetic epitope
SKSASGNAEY

SEQ ID NO: 45758 - protein, 10 aa, Artificial Sequence
  Description of Artificial Sequence: Synthetic epitope
SKSASHKGSR

SEQ ID NO: 45759 - protein, 10 aa, Artificial Sequence
  Description of Artificial Sequence: Synthetic epitope
SKSASKMDTT

SEQ ID NO: 45760 - protein, 10 aa, Artificial Sequence
  Description of Artificial Sequence: Synthetic epitope
SKSDLRSNDF

SEQ ID NO: 45761 - protein, 10 aa, Artificial Sequence
  Description of Artificial Sequence: Synthetic epitope
SKSDSLQKQI

SEQ ID NO: 45762 - protein, 10 aa, Artificial Sequence
  Description of Artificial Sequence: Synthetic epitope
SKSDTALEEA

SEQ ID NO: 45763 - protein, 10 aa, Artificial Sequence
  Description of Artificial Sequence: Synthetic epitope
SKSEDSAEAY

SEQ ID NO: 45764 - protein, 10 aa, Artificial Sequence
  Description of Artificial Sequence: Synthetic epitope
SKSEENSAGI

SEQ ID NO: 45765 - protein, 10 aa, Artificial Sequence
  Description of Artificial Sequence: Synthetic epitope
SKSEIVVQFP

SEQ ID NO: 45766 - protein, 10 aa, Artificial Sequence
  Description of Artificial Sequence: Synthetic epitope
SKSEMHRGKK

SEQ ID NO: 45767 - protein, 10 aa, Artificial Sequence
  Description of Artificial Sequence: Synthetic epitope
SKSEMQVKEQ

SEQ ID NO: 45768 - protein, 10 aa, Artificial Sequence
  Description of Artificial Sequence: Synthetic epitope
SKSEPPLESS

SEQ ID NO: 45769 - protein, 10 aa, Artificial Sequence
  Description of Artificial Sequence: Synthetic epitope
SKSERNSGAG

SEQ ID NO: 45770 - protein, 10 aa, Artificial Sequence
  Description of Artificial Sequence: Synthetic epitope
SKSESDISKI

SEQ ID NO: 45771 - protein, 10 aa, Artificial Sequence
  Description of Artificial Sequence: Synthetic epitope
SKSESKIDLT

SEQ ID NO: 45772 - protein, 10 aa, Artificial Sequence
  Description of Artificial Sequence: Synthetic epitope
SKSEVLQESI

SEQ ID NO: 45773 - protein, 10 aa, Artificial Sequence
  Description of Artificial Sequence: Synthetic epitope
SKSFSLKALQ

SEQ ID NO: 45774 - protein, 10 aa, Artificial Sequence
  Description of Artificial Sequence: Synthetic epitope
SKSGSSFETQ

SEQ ID NO: 45775 - protein, 10 aa, Artificial Sequence
  Description of Artificial Sequence: Synthetic epitope
SKSGSSKRNK

SEQ ID NO: 45776 - protein, 10 aa, Artificial Sequence
  Description of Artificial Sequence: Synthetic epitope
SKSGVQYKGH

SEQ ID NO: 45777 - protein, 10 aa, Artificial Sequence
  Description of Artificial Sequence: Synthetic epitope
SKSIAKNSDS

SEQ ID NO: 45778 - protein, 10 aa, Artificial Sequence
  Description of Artificial Sequence: Synthetic epitope
SKSIKEVSSR

SEQ ID NO: 45779 - protein, 10 aa, Artificial Sequence
  Description of Artificial Sequence: Synthetic epitope
SKSILDQSIS

SEQ ID NO: 45780 - protein, 10 aa, Artificial Sequence
  Description of Artificial Sequence: Synthetic epitope
SKSKAALRRS

SEQ ID NO: 45781 - protein, 10 aa, Artificial Sequence
  Description of Artificial Sequence: Synthetic epitope
SKSKLKAGKL

SEQ ID NO: 45782 - protein, 10 aa, Artificial Sequence
  Description of Artificial Sequence: Synthetic epitope
SKSKSASFKE

SEQ ID NO: 45783 - protein, 10 aa, Artificial Sequence
  Description of Artificial Sequence: Synthetic epitope
SKSKSMDKSD

SEQ ID NO: 45784 - protein, 10 aa, Artificial Sequence
  Description of Artificial Sequence: Synthetic epitope
SKSKSQEQKN

SEQ ID NO: 45785 - protein, 10 aa, Artificial Sequence
  Description of Artificial Sequence: Synthetic epitope
SKSKSQLTSQ

SEQ ID NO: 45786 - protein, 10 aa, Artificial Sequence
  Description of Artificial Sequence: Synthetic epitope
SKSKSQLTSQ

SEQ ID NO: 45787 - protein, 10 aa, Artificial Sequence
  Description of Artificial Sequence: Synthetic epitope
SKSKSQLTSQ

SEQ ID NO: 45788 - protein, 10 aa, Artificial Sequence
  Description of Artificial Sequence: Synthetic epitope
SKSKSQLTSQ

SEQ ID NO: 45789 - protein, 10 aa, Artificial Sequence
  Description of Artificial Sequence: Synthetic epitope
SKSKSQLTSQ

SEQ ID NO: 45790 - protein, 10 aa, Artificial Sequence
  Description of Artificial Sequence: Synthetic epitope
SKSKSQLTSQ

SEQ ID NO: 45791 - protein, 10 aa, Artificial Sequence
  Description of Artificial Sequence: Synthetic epitope
SKSKSQLTSQ

SEQ ID NO: 45792 - protein, 10 aa, Artificial Sequence
  Description of Artificial Sequence: Synthetic epitope
SKSKSQLTSQ

SEQ ID NO: 45793 - protein, 10 aa, Artificial Sequence
  Description of Artificial Sequence: Synthetic epitope
SKSKSSFKET

SEQ ID NO: 45794 - protein, 10 aa, Artificial Sequence
  Description of Artificial Sequence: Synthetic epitope
SKSLAYIERD

SEQ ID NO: 45795 - protein, 10 aa, Artificial Sequence
  Description of Artificial Sequence: Synthetic epitope
SKSMARARNR

SEQ ID NO: 45796 - protein, 10 aa, Artificial Sequence
  Description of Artificial Sequence: Synthetic epitope
SKSMDESRLD

SEQ ID NO: 45797 - protein, 10 aa, Artificial Sequence
  Description of Artificial Sequence: Synthetic epitope
SKSNANLPSS

SEQ ID NO: 45798 - protein, 10 aa, Artificial Sequence
  Description of Artificial Sequence: Synthetic epitope
SKSNDSTEQN

SEQ ID NO: 45799 - protein, 10 aa, Artificial Sequence
  Description of Artificial Sequence: Synthetic epitope
SKSNLSYNTK

SEQ ID NO: 45800 - protein, 10 aa, Artificial Sequence
  Description of Artificial Sequence: Synthetic epitope
SKSNNQNVEP

SEQ ID NO: 45801 - protein, 10 aa, Artificial Sequence
  Description of Artificial Sequence: Synthetic epitope
SKSNRAEVVI

SEQ ID NO: 45802 - protein, 10 aa, Artificial Sequence
  Description of Artificial Sequence: Synthetic epitope
SKSPKPSKSA

SEQ ID NO: 45803 - protein, 10 aa, Artificial Sequence
  Description of Artificial Sequence: Synthetic epitope
SKSPRVARRA

SEQ ID NO: 45804 - protein, 10 aa, Artificial Sequence
  Description of Artificial Sequence: Synthetic epitope
SKSQLKVLSH

SEQ ID NO: 45805 - protein, 10 aa, Artificial Sequence
  Description of Artificial Sequence: Synthetic epitope
SKSQLKVLSH

SEQ ID NO: 45806 - protein, 10 aa, Artificial Sequence
  Description of Artificial Sequence: Synthetic epitope
SKSQQATAWT

SEQ ID NO: 45807 - protein, 10 aa, Artificial Sequence
  Description of Artificial Sequence: Synthetic epitope
SKSRKTKPEE

SEQ ID NO: 45808 - protein, 10 aa, Artificial Sequence
  Description of Artificial Sequence: Synthetic epitope
SKSRQELEQH

SEQ ID NO: 45809 - protein, 10 aa, Artificial Sequence
  Description of Artificial Sequence: Synthetic epitope
SKSRSRSAEK

SEQ ID NO: 45810 - protein, 10 aa, Artificial Sequence
  Description of Artificial Sequence: Synthetic epitope
SKSRSRTRSR

SEQ ID NO: 45811 - protein, 10 aa, Artificial Sequence
  Description of Artificial Sequence: Synthetic epitope
SKSRTLTRQS

SEQ ID NO: 45812 - protein, 10 aa, Artificial Sequence
  Description of Artificial Sequence: Synthetic epitope
SKSRTSFVED

SEQ ID NO: 45813 - protein, 10 aa, Artificial Sequence
  Description of Artificial Sequence: Synthetic epitope
SKSSHRKENS

SEQ ID NO: 45814 - protein, 10 aa, Artificial Sequence
  Description of Artificial Sequence: Synthetic epitope
SKSSIELKHL

SEQ ID NO: 45815 - protein, 10 aa, Artificial Sequence
  Description of Artificial Sequence: Synthetic epitope
SKSSTAAYQP

SEQ ID NO: 45816 - protein, 10 aa, Artificial Sequence
  Description of Artificial Sequence: Synthetic epitope
SKSSTSLAFE

SEQ ID NO: 45817 - protein, 10 aa, Artificial Sequence
  Description of Artificial Sequence: Synthetic epitope
SKSSTTGYTT

SEQ ID NO: 45818 - protein, 10 aa, Artificial Sequence
  Description of Artificial Sequence: Synthetic epitope
SKSTKSTSTK

SEQ ID NO: 45819 - protein, 10 aa, Artificial Sequence
  Description of Artificial Sequence: Synthetic epitope
SKSTSTFSNT

SEQ ID NO: 45820 - protein, 10 aa, Artificial Sequence
  Description of Artificial Sequence: Synthetic epitope
SKSTTRLDSD

SEQ ID NO: 45821 - protein, 10 aa, Artificial Sequence
  Description of Artificial Sequence: Synthetic epitope
SKSVDSSLGG

SEQ ID NO: 45822 - protein, 10 aa, Artificial Sequence
  Description of Artificial Sequence: Synthetic epitope
SKSVNVKPLV

SEQ ID NO: 45823 - protein, 10 aa, Artificial Sequence
  Description of Artificial Sequence: Synthetic epitope
SKSVSAAEQQ

SEQ ID NO: 45824 - protein, 10 aa, Artificial Sequence
  Description of Artificial Sequence: Synthetic epitope
SKSVSLLSKH

SEQ ID NO: 45825 - protein, 10 aa, Artificial Sequence
  Description of Artificial Sequence: Synthetic epitope
SKSVTEIHLY

SEQ ID NO: 45826 - protein, 10 aa, Artificial Sequence
  Description of Artificial Sequence: Synthetic epitope
SKSWKQIELD

SEQ ID NO: 45827 - protein, 10 aa, Artificial Sequence
  Description of Artificial Sequence: Synthetic epitope
SKTAAKGEAA

SEQ ID NO: 45828 - protein, 10 aa, Artificial Sequence
  Description of Artificial Sequence: Synthetic epitope
SKTAVAIEKV

SEQ ID NO: 45829 - protein, 10 aa, Artificial Sequence
  Description of Artificial Sequence: Synthetic epitope
SKTAVGSSDS

SEQ ID NO: 45830 - protein, 10 aa, Artificial Sequence
  Description of Artificial Sequence: Synthetic epitope
SKTDSSMLTQ

SEQ ID NO: 45831 - protein, 10 aa, Artificial Sequence
  Description of Artificial Sequence: Synthetic epitope
SKTEGAGINK

SEQ ID NO: 45832 - protein, 10 aa, Artificial Sequence
  Description of Artificial Sequence: Synthetic epitope
SKTELKQNNQ

SEQ ID NO: 45833 - protein, 10 aa, Artificial Sequence
  Description of Artificial Sequence: Synthetic epitope
SKTEQSVALL

SEQ ID NO: 45834 - protein, 10 aa, Artificial Sequence
  Description of Artificial Sequence: Synthetic epitope
SKTEQSVALL

SEQ ID NO: 45835 - protein, 10 aa, Artificial Sequence
  Description of Artificial Sequence: Synthetic epitope
SKTETHEHKK

SEQ ID NO: 45836 - protein, 10 aa, Artificial Sequence
  Description of Artificial Sequence: Synthetic epitope
SKTETVEEPM

SEQ ID NO: 45837 - protein, 10 aa, Artificial Sequence
  Description of Artificial Sequence: Synthetic epitope
SKTIATSQNR

SEQ ID NO: 45838 - protein, 10 aa, Artificial Sequence
  Description of Artificial Sequence: Synthetic epitope
SKTIQMLTEA

SEQ ID NO: 45839 - protein, 10 aa, Artificial Sequence
  Description of Artificial Sequence: Synthetic epitope
SKTKKHVSRA

SEQ ID NO: 45840 - protein, 10 aa, Artificial Sequence
  Description of Artificial Sequence: Synthetic epitope
SKTKTIVEPP

SEQ ID NO: 45841 - protein, 10 aa, Artificial Sequence
  Description of Artificial Sequence: Synthetic epitope
SKTKVVMKGQ

SEQ ID NO: 45842 - protein, 10 aa, Artificial Sequence
  Description of Artificial Sequence: Synthetic epitope
SKTLEKAMTE

SEQ ID NO: 45843 - protein, 10 aa, Artificial Sequence
  Description of Artificial Sequence: Synthetic epitope
SKTLERQMQP

SEQ ID NO: 45844 - protein, 10 aa, Artificial Sequence
  Description of Artificial Sequence: Synthetic epitope
SKTLKDAEKA

SEQ ID NO: 45845 - protein, 10 aa, Artificial Sequence
  Description of Artificial Sequence: Synthetic epitope
SKTLTAQSHM

SEQ ID NO: 45846 - protein, 10 aa, Artificial Sequence
  Description of Artificial Sequence: Synthetic epitope
SKTLVDQRFL

SEQ ID NO: 45847 - protein, 10 aa, Artificial Sequence
  Description of Artificial Sequence: Synthetic epitope
SKTLVETAKE

SEQ ID NO: 45848 - protein, 10 aa, Artificial Sequence
  Description of Artificial Sequence: Synthetic epitope
SKTNESLGTW

SEQ ID NO: 45849 - protein, 10 aa, Artificial Sequence
  Description of Artificial Sequence: Synthetic epitope
SKTNPSVSSL

SEQ ID NO: 45850 - protein, 10 aa, Artificial Sequence
  Description of Artificial Sequence: Synthetic epitope
SKTQQKSREL

SEQ ID NO: 45851 - protein, 10 aa, Artificial Sequence
  Description of Artificial Sequence: Synthetic epitope
SKTQTQSAPA

SEQ ID NO: 45852 - protein, 10 aa, Artificial Sequence
  Description of Artificial Sequence: Synthetic epitope
SKTQYEAVQS

SEQ ID NO: 45853 - protein, 10 aa, Artificial Sequence
  Description of Artificial Sequence: Synthetic epitope
SKTRAGANSK

SEQ ID NO: 45854 - protein, 10 aa, Artificial Sequence
  Description of Artificial Sequence: Synthetic epitope
SKTRQIISTI

SEQ ID NO: 45855 - protein, 10 aa, Artificial Sequence
  Description of Artificial Sequence: Synthetic epitope
SKTSAVEMTQ

SEQ ID NO: 45856 - protein, 10 aa, Artificial Sequence
  Description of Artificial Sequence: Synthetic epitope
SKTSDQAYIE

SEQ ID NO: 45857 - protein, 10 aa, Artificial Sequence
  Description of Artificial Sequence: Synthetic epitope
SKTSFSEAKT

SEQ ID NO: 45858 - protein, 10 aa, Artificial Sequence
  Description of Artificial Sequence: Synthetic epitope
SKTSKDANKS

SEQ ID NO: 45859 - protein, 10 aa, Artificial Sequence
  Description of Artificial Sequence: Synthetic epitope
SKTSLRSGTK

SEQ ID NO: 45860 - protein, 10 aa, Artificial Sequence
  Description of Artificial Sequence: Synthetic epitope
SKTSQVPVKH

SEQ ID NO: 45861 - protein, 10 aa, Artificial Sequence
  Description of Artificial Sequence: Synthetic epitope
SKTTAEKVDS

SEQ ID NO: 45862 - protein, 10 aa, Artificial Sequence
  Description of Artificial Sequence: Synthetic epitope
SKTTYQFIAS

SEQ ID NO: 45863 - protein, 10 aa, Artificial Sequence
  Description of Artificial Sequence: Synthetic epitope
SKTVDVLSRK

SEQ ID NO: 45864 - protein, 10 aa, Artificial Sequence
  Description of Artificial Sequence: Synthetic epitope
SKTWELSLYE

SEQ ID NO: 45865 - protein, 10 aa, Artificial Sequence
  Description of Artificial Sequence: Synthetic epitope
SKTYTSFPKS

SEQ ID NO: 45866 - protein, 10 aa, Artificial Sequence
  Description of Artificial Sequence: Synthetic epitope
SKVAAEPFDT

SEQ ID NO: 45867 - protein, 10 aa, Artificial Sequence
  Description of Artificial Sequence: Synthetic epitope
SKVALQAQIE

SEQ ID NO: 45868 - protein, 10 aa, Artificial Sequence
  Description of Artificial Sequence: Synthetic epitope
SKVASYEKKV

SEQ ID NO: 45869 - protein, 10 aa, Artificial Sequence
  Description of Artificial Sequence: Synthetic epitope
SKVDRGVSTV

SEQ ID NO: 45870 - protein, 10 aa, Artificial Sequence
  Description of Artificial Sequence: Synthetic epitope
SKVETAESRV

SEQ ID NO: 45871 - protein, 10 aa, Artificial Sequence
  Description of Artificial Sequence: Synthetic epitope
SKVGSTSQPT

SEQ ID NO: 45872 - protein, 10 aa, Artificial Sequence
  Description of Artificial Sequence: Synthetic epitope
SKVIEAVSEE

SEQ ID NO: 45873 - protein, 10 aa, Artificial Sequence
  Description of Artificial Sequence: Synthetic epitope
SKVKENLNKT

SEQ ID NO: 45874 - protein, 10 aa, Artificial Sequence
  Description of Artificial Sequence: Synthetic epitope
SKVKRVVQLA

SEQ ID NO: 45875 - protein, 10 aa, Artificial Sequence
  Description of Artificial Sequence: Synthetic epitope
SKVKTRSKSE

SEQ ID NO: 45876 - protein, 10 aa, Artificial Sequence
  Description of Artificial Sequence: Synthetic epitope
SKVKTSLGLD

SEQ ID NO: 45877 - protein, 10 aa, Artificial Sequence
  Description of Artificial Sequence: Synthetic epitope
SKVLAAEERV

SEQ ID NO: 45878 - protein, 10 aa, Artificial Sequence
  Description of Artificial Sequence: Synthetic epitope
SKVLENASSV

SEQ ID NO: 45879 - protein, 10 aa, Artificial Sequence
  Description of Artificial Sequence: Synthetic epitope
SKVLGSYKER

SEQ ID NO: 45880 - protein, 10 aa, Artificial Sequence
  Description of Artificial Sequence: Synthetic epitope
SKVNIKDKVL

SEQ ID NO: 45881 - protein, 10 aa, Artificial Sequence
  Description of Artificial Sequence: Synthetic epitope
SKVNKAQEDD

SEQ ID NO: 45882 - protein, 10 aa, Artificial Sequence
  Description of Artificial Sequence: Synthetic epitope
SKVNLVALET

SEQ ID NO: 45883 - protein, 10 aa, Artificial Sequence
  Description of Artificial Sequence: Synthetic epitope
SKVQKVKGKS

SEQ ID NO: 45884 - protein, 10 aa, Artificial Sequence
  Description of Artificial Sequence: Synthetic epitope
SKVRGTSKPI

SEQ ID NO: 45885 - protein, 10 aa, Artificial Sequence
  Description of Artificial Sequence: Synthetic epitope
SKVRRKGLGK

SEQ ID NO: 45886 - protein, 10 aa, Artificial Sequence
  Description of Artificial Sequence: Synthetic epitope
SKVRSDKSLK

SEQ ID NO: 45887 - protein, 10 aa, Artificial Sequence
  Description of Artificial Sequence: Synthetic epitope
SKVSKWSTDE

SEQ ID NO: 45888 - protein, 10 aa, Artificial Sequence
  Description of Artificial Sequence: Synthetic epitope
SKVSRKGSKD

SEQ ID NO: 45889 - protein, 10 aa, Artificial Sequence
  Description of Artificial Sequence: Synthetic epitope
SKVSSRVEKD

SEQ ID NO: 45890 - protein, 10 aa, Artificial Sequence
  Description of Artificial Sequence: Synthetic epitope
SKVTNKDATK

SEQ ID NO: 45891 - protein, 10 aa, Artificial Sequence
  Description of Artificial Sequence: Synthetic epitope
SKVVELSELS

SEQ ID NO: 45892 - protein, 10 aa, Artificial Sequence
  Description of Artificial Sequence: Synthetic epitope
SKVVPDVGKV

SEQ ID NO: 45893 - protein, 10 aa, Artificial Sequence
  Description of Artificial Sequence: Synthetic epitope
SKVVPEAELQ

SEQ ID NO: 45894 - protein, 10 aa, Artificial Sequence
  Description of Artificial Sequence: Synthetic epitope
SKWESKSKPT

SEQ ID NO: 45895 - protein, 10 aa, Artificial Sequence
  Description of Artificial Sequence: Synthetic epitope
SKWINGMDEQ

SEQ ID NO: 45896 - protein, 10 aa, Artificial Sequence
  Description of Artificial Sequence: Synthetic epitope
SKWKSSLSKR

SEQ ID NO: 45897 - protein, 10 aa, Artificial Sequence
  Description of Artificial Sequence: Synthetic epitope
SKWMSVQYFE

SEQ ID NO: 45898 - protein, 10 aa, Artificial Sequence
  Description of Artificial Sequence: Synthetic epitope
SKYDSVSNHQ

SEQ ID NO: 45899 - protein, 10 aa, Artificial Sequence
  Description of Artificial Sequence: Synthetic epitope
SKYEKTTSAV

SEQ ID NO: 45900 - protein, 10 aa, Artificial Sequence
  Description of Artificial Sequence: Synthetic epitope
SKYESVMKTE

SEQ ID NO: 45901 - protein, 10 aa, Artificial Sequence
  Description of Artificial Sequence: Synthetic epitope
SKYETLQMAQ

SEQ ID NO: 45902 - protein, 10 aa, Artificial Sequence
  Description of Artificial Sequence: Synthetic epitope
SKYEVKAPVP

SEQ ID NO: 45903 - protein, 10 aa, Artificial Sequence
  Description of Artificial Sequence: Synthetic epitope
SKYIDKTIRV

SEQ ID NO: 45904 - protein, 10 aa, Artificial Sequence
  Description of Artificial Sequence: Synthetic epitope
SKYKIAIQHQ

SEQ ID NO: 45905 - protein, 10 aa, Artificial Sequence
  Description of Artificial Sequence: Synthetic epitope
SKYQSSQGDI

SEQ ID NO: 45906 - protein, 10 aa, Artificial Sequence
  Description of Artificial Sequence: Synthetic epitope
SKYRSVRKKS

SEQ ID NO: 45907 - protein, 10 aa, Artificial Sequence
  Description of Artificial Sequence: Synthetic epitope
SKYSQTESQQ

SEQ ID NO: 45908 - protein, 10 aa, Artificial Sequence
  Description of Artificial Sequence: Synthetic epitope
SKYTDDTEED

SEQ ID NO: 45909 - protein, 10 aa, Artificial Sequence
  Description of Artificial Sequence: Synthetic epitope
SKYTFESTII

SEQ ID NO: 45910 - protein, 10 aa, Artificial Sequence
  Description of Artificial Sequence: Synthetic epitope
SLAADGKLLK

SEQ ID NO: 45911 - protein, 10 aa, Artificial Sequence
  Description of Artificial Sequence: Synthetic epitope
SLAADQLLKL

SEQ ID NO: 45912 - protein, 10 aa, Artificial Sequence
  Description of Artificial Sequence: Synthetic epitope
SLAAMQNVFD

SEQ ID NO: 45913 - protein, 10 aa, Artificial Sequence
  Description of Artificial Sequence: Synthetic epitope
SLAAPIDHKP

SEQ ID NO: 45914 - protein, 10 aa, Artificial Sequence
  Description of Artificial Sequence: Synthetic epitope
SLAARSQLQE

SEQ ID NO: 45915 - protein, 10 aa, Artificial Sequence
  Description of Artificial Sequence: Synthetic epitope
SLAARYATQS

SEQ ID NO: 45916 - protein, 10 aa, Artificial Sequence
  Description of Artificial Sequence: Synthetic epitope
SLAASAASTE

SEQ ID NO: 45917 - protein, 10 aa, Artificial Sequence
  Description of Artificial Sequence: Synthetic epitope
SLAASSVTKA

SEQ ID NO: 45918 - protein, 10 aa, Artificial Sequence
  Description of Artificial Sequence: Synthetic epitope
SLADSNAREF

SEQ ID NO: 45919 - protein, 10 aa, Artificial Sequence
  Description of Artificial Sequence: Synthetic epitope
SLAEAASKAD

SEQ ID NO: 45920 - protein, 10 aa, Artificial Sequence
  Description of Artificial Sequence: Synthetic epitope
SLAEIVKKDD

SEQ ID NO: 45921 - protein, 10 aa, Artificial Sequence
  Description of Artificial Sequence: Synthetic epitope
SLAGALNAGF

SEQ ID NO: 45922 - protein, 10 aa, Artificial Sequence
  Description of Artificial Sequence: Synthetic epitope
SLAGRAKLSS

SEQ ID NO: 45923 - protein, 10 aa, Artificial Sequence
  Description of Artificial Sequence: Synthetic epitope
SLAGTMLSSH

SEQ ID NO: 45924 - protein, 10 aa, Artificial Sequence
  Description of Artificial Sequence: Synthetic epitope
SLAKALRPTK

SEQ ID NO: 45925 - protein, 10 aa, Artificial Sequence
  Description of Artificial Sequence: Synthetic epitope
SLAKHELAPA

SEQ ID NO: 45926 - protein, 10 aa, Artificial Sequence
  Description of Artificial Sequence: Synthetic epitope
SLAKSQSTET

SEQ ID NO: 45927 - protein, 10 aa, Artificial Sequence
  Description of Artificial Sequence: Synthetic epitope
SLAKTRLADL

SEQ ID NO: 45928 - protein, 10 aa, Artificial Sequence
  Description of Artificial Sequence: Synthetic epitope
SLAMEESQEA

SEQ ID NO: 45929 - protein, 10 aa, Artificial Sequence
  Description of Artificial Sequence: Synthetic epitope
SLANEALLPT

SEQ ID NO: 45930 - protein, 10 aa, Artificial Sequence
  Description of Artificial Sequence: Synthetic epitope
SLANKAEFLD

SEQ ID NO: 45931 - protein, 10 aa, Artificial Sequence
  Description of Artificial Sequence: Synthetic epitope
SLANKRAFKP

SEQ ID NO: 45932 - protein, 10 aa, Artificial Sequence
  Description of Artificial Sequence: Synthetic epitope
SLAQGSAGTL

SEQ ID NO: 45933 - protein, 10 aa, Artificial Sequence
  Description of Artificial Sequence: Synthetic epitope
SLAQQATVTM

SEQ ID NO: 45934 - protein, 10 aa, Artificial Sequence
  Description of Artificial Sequence: Synthetic epitope
SLAQVEEPAI

SEQ ID NO: 45935 - protein, 10 aa, Artificial Sequence
  Description of Artificial Sequence: Synthetic epitope
SLAQVTDVDK

SEQ ID NO: 45936 - protein, 10 aa, Artificial Sequence
  Description of Artificial Sequence: Synthetic epitope
SLARSTGQQL

SEQ ID NO: 45937 - protein, 10 aa, Artificial Sequence
  Description of Artificial Sequence: Synthetic epitope
SLASGSTQRQ

SEQ ID NO: 45938 - protein, 10 aa, Artificial Sequence
  Description of Artificial Sequence: Synthetic epitope
SLASHISDKQ

SEQ ID NO: 45939 - protein, 10 aa, Artificial Sequence
  Description of Artificial Sequence: Synthetic epitope
SLASKPLSSK

SEQ ID NO: 45940 - protein, 10 aa, Artificial Sequence
  Description of Artificial Sequence: Synthetic epitope
SLASKVTRLK

SEQ ID NO: 45941 - protein, 10 aa, Artificial Sequence
  Description of Artificial Sequence: Synthetic epitope
SLASSIATQP

SEQ ID NO: 45942 - protein, 10 aa, Artificial Sequence
  Description of Artificial Sequence: Synthetic epitope
SLASTASSQK

SEQ ID NO: 45943 - protein, 10 aa, Artificial Sequence
  Description of Artificial Sequence: Synthetic epitope
SLASVRAFAT

SEQ ID NO: 45944 - protein, 10 aa, Artificial Sequence
  Description of Artificial Sequence: Synthetic epitope
SLATAGSAFQ

SEQ ID NO: 45945 - protein, 10 aa, Artificial Sequence
  Description of Artificial Sequence: Synthetic epitope
SLATFHEGKH

SEQ ID NO: 45946 - protein, 10 aa, Artificial Sequence
  Description of Artificial Sequence: Synthetic epitope
SLATVEAAVQ

SEQ ID NO: 45947 - protein, 10 aa, Artificial Sequence
  Description of Artificial Sequence: Synthetic epitope
SLAVNVLKEL

SEQ ID NO: 45948 - protein, 10 aa, Artificial Sequence
  Description of Artificial Sequence: Synthetic epitope
SLAVQIQPDF

SEQ ID NO: 45949 - protein, 10 aa, Artificial Sequence
  Description of Artificial Sequence: Synthetic epitope
SLDASTQTTH

SEQ ID NO: 45950 - protein, 10 aa, Artificial Sequence
  Description of Artificial Sequence: Synthetic epitope
SLDDSYVERR

SEQ ID NO: 45951 - protein, 10 aa, Artificial Sequence
  Description of Artificial Sequence: Synthetic epitope
SLDESTQESK

SEQ ID NO: 45952 - protein, 10 aa, Artificial Sequence
  Description of Artificial Sequence: Synthetic epitope
SLDISEKEKD

SEQ ID NO: 45953 - protein, 10 aa, Artificial Sequence
  Description of Artificial Sequence: Synthetic epitope
SLDKAMSIPM

SEQ ID NO: 45954 - protein, 10 aa, Artificial Sequence
  Description of Artificial Sequence: Synthetic epitope
SLDKEEFGAS

SEQ ID NO: 45955 - protein, 10 aa, Artificial Sequence
  Description of Artificial Sequence: Synthetic epitope
SLDLATSAAS

SEQ ID NO: 45956 - protein, 10 aa, Artificial Sequence
  Description of Artificial Sequence: Synthetic epitope
SLDLLKAQKK

SEQ ID NO: 45957 - protein, 10 aa, Artificial Sequence
  Description of Artificial Sequence: Synthetic epitope
SLDLNAAESG

SEQ ID NO: 45958 - protein, 10 aa, Artificial Sequence
  Description of Artificial Sequence: Synthetic epitope
SLDLTTLVPE

SEQ ID NO: 45959 - protein, 10 aa, Artificial Sequence
  Description of Artificial Sequence: Synthetic epitope
SLDMMSVQAN

SEQ ID NO: 45960 - protein, 10 aa, Artificial Sequence
  Description of Artificial Sequence: Synthetic epitope
SLDMVKWDSR

SEQ ID NO: 45961 - protein, 10 aa, Artificial Sequence
  Description of Artificial Sequence: Synthetic epitope
SLDQDSPSKK

SEQ ID NO: 45962 - protein, 10 aa, Artificial Sequence
  Description of Artificial Sequence: Synthetic epitope
SLDSLVAPDT

SEQ ID NO: 45963 - protein, 10 aa, Artificial Sequence
  Description of Artificial Sequence: Synthetic epitope
SLDSNSSEMA

SEQ ID NO: 45964 - protein, 10 aa, Artificial Sequence
  Description of Artificial Sequence: Synthetic epitope
SLDSSIESLG

SEQ ID NO: 45965 - protein, 10 aa, Artificial Sequence
  Description of Artificial Sequence: Synthetic epitope
SLDSVFSDKL

SEQ ID NO: 45966 - protein, 10 aa, Artificial Sequence
  Description of Artificial Sequence: Synthetic epitope
SLDTAALSAT

SEQ ID NO: 45967 - protein, 10 aa, Artificial Sequence
  Description of Artificial Sequence: Synthetic epitope
SLDTASSPLA

SEQ ID NO: 45968 - protein, 10 aa, Artificial Sequence
  Description of Artificial Sequence: Synthetic epitope
SLDTKTITTM

SEQ ID NO: 45969 - protein, 10 aa, Artificial Sequence
  Description of Artificial Sequence: Synthetic epitope
SLDTSLFFGT

SEQ ID NO: 45970 - protein, 10 aa, Artificial Sequence
  Description of Artificial Sequence: Synthetic epitope
SLDTSLFFGT

SEQ ID NO: 45971 - protein, 10 aa, Artificial Sequence
  Description of Artificial Sequence: Synthetic epitope
SLDWQIDVDL

SEQ ID NO: 45972 - protein, 10 aa, Artificial Sequence
  Description of Artificial Sequence: Synthetic epitope
SLEAEAAVGP

SEQ ID NO: 45973 - protein, 10 aa, Artificial Sequence
  Description of Artificial Sequence: Synthetic epitope
SLEAIDQELS

SEQ ID NO: 45974 - protein, 10 aa, Artificial Sequence
  Description of Artificial Sequence: Synthetic epitope
SLEEASSISA

SEQ ID NO: 45975 - protein, 10 aa, Artificial Sequence
  Description of Artificial Sequence: Synthetic epitope
SLEEPLIESS

SEQ ID NO: 45976 - protein, 10 aa, Artificial Sequence
  Description of Artificial Sequence: Synthetic epitope
SLEEVVRSGQ

SEQ ID NO: 45977 - protein, 10 aa, Artificial Sequence
  Description of Artificial Sequence: Synthetic epitope
SLEFLTELVI

SEQ ID NO: 45978 - protein, 10 aa, Artificial Sequence
  Description of Artificial Sequence: Synthetic epitope
SLEHQKSSRD

SEQ ID NO: 45979 - protein, 10 aa, Artificial Sequence
  Description of Artificial Sequence: Synthetic epitope
SLEKQQRVNV

SEQ ID NO: 45980 - protein, 10 aa, Artificial Sequence
  Description of Artificial Sequence: Synthetic epitope
SLEKQTVKSH

SEQ ID NO: 45981 - protein, 10 aa, Artificial Sequence
  Description of Artificial Sequence: Synthetic epitope
SLEKSKRKKP

SEQ ID NO: 45982 - protein, 10 aa, Artificial Sequence
  Description of Artificial Sequence: Synthetic epitope
SLELLSYEES

SEQ ID NO: 45983 - protein, 10 aa, Artificial Sequence
  Description of Artificial Sequence: Synthetic epitope
SLELQEVEPL

SEQ ID NO: 45984 - protein, 10 aa, Artificial Sequence
  Description of Artificial Sequence: Synthetic epitope
SLENKLLQLK

SEQ ID NO: 45985 - protein, 10 aa, Artificial Sequence
  Description of Artificial Sequence: Synthetic epitope
SLENRSAIVK

SEQ ID NO: 45986 - protein, 10 aa, Artificial Sequence
  Description of Artificial Sequence: Synthetic epitope
SLEQALAVLV

SEQ ID NO: 45987 - protein, 10 aa, Artificial Sequence
  Description of Artificial Sequence: Synthetic epitope
SLEQLRSVRQ

SEQ ID NO: 45988 - protein, 10 aa, Artificial Sequence
  Description of Artificial Sequence: Synthetic epitope
SLERAAEHAQ

SEQ ID NO: 45989 - protein, 10 aa, Artificial Sequence
  Description of Artificial Sequence: Synthetic epitope
SLERGLTAQS

SEQ ID NO: 45990 - protein, 10 aa, Artificial Sequence
  Description of Artificial Sequence: Synthetic epitope
SLERLSVKVA

SEQ ID NO: 45991 - protein, 10 aa, Artificial Sequence
  Description of Artificial Sequence: Synthetic epitope
SLERQTELST

SEQ ID NO: 45992 - protein, 10 aa, Artificial Sequence
  Description of Artificial Sequence: Synthetic epitope
SLESAASSAI

SEQ ID NO: 45993 - protein, 10 aa, Artificial Sequence
  Description of Artificial Sequence: Synthetic epitope
SLESAEYLKL

SEQ ID NO: 45994 - protein, 10 aa, Artificial Sequence
  Description of Artificial Sequence: Synthetic epitope
SLESKYVFFR

SEQ ID NO: 45995 - protein, 10 aa, Artificial Sequence
  Description of Artificial Sequence: Synthetic epitope
SLESRANEAQ

SEQ ID NO: 45996 - protein, 10 aa, Artificial Sequence
  Description of Artificial Sequence: Synthetic epitope
SLESSASALD

SEQ ID NO: 45997 - protein, 10 aa, Artificial Sequence
  Description of Artificial Sequence: Synthetic epitope
SLESSASLEG

SEQ ID NO: 45998 - protein, 10 aa, Artificial Sequence
  Description of Artificial Sequence: Synthetic epitope
SLETKKASPF

SEQ ID NO: 45999 - protein, 10 aa, Artificial Sequence
  Description of Artificial Sequence: Synthetic epitope
SLETKTSDTE

SEQ ID NO: 46000 - protein, 10 aa, Artificial Sequence
  Description of Artificial Sequence: Synthetic epitope
SLETQRAQSS

SEQ ID NO: 46001 - protein, 10 aa, Artificial Sequence
  Description of Artificial Sequence: Synthetic epitope
SLEVRKLSNG

SEQ ID NO: 46002 - protein, 10 aa, Artificial Sequence
  Description of Artificial Sequence: Synthetic epitope
SLFDAQMTRE

SEQ ID NO: 46003 - protein, 10 aa, Artificial Sequence
  Description of Artificial Sequence: Synthetic epitope
SLFDEFMEMM

SEQ ID NO: 46004 - protein, 10 aa, Artificial Sequence
  Description of Artificial Sequence: Synthetic epitope
SLFDIYSSDS

SEQ ID NO: 46005 - protein, 10 aa, Artificial Sequence
  Description of Artificial Sequence: Synthetic epitope
SLFHLKTESN

SEQ ID NO: 46006 - protein, 10 aa, Artificial Sequence
  Description of Artificial Sequence: Synthetic epitope
SLFMTSTASP

SEQ ID NO: 46007 - protein, 10 aa, Artificial Sequence
  Description of Artificial Sequence: Synthetic epitope
SLFQVASLQD

SEQ ID NO: 46008 - protein, 10 aa, Artificial Sequence
  Description of Artificial Sequence: Synthetic epitope
SLFSSEESNL

SEQ ID NO: 46009 - protein, 10 aa, Artificial Sequence
  Description of Artificial Sequence: Synthetic epitope
SLFVRNSTER

SEQ ID NO: 46010 - protein, 10 aa, Artificial Sequence
  Description of Artificial Sequence: Synthetic epitope
SLGDFRTKEE

SEQ ID NO: 46011 - protein, 10 aa, Artificial Sequence
  Description of Artificial Sequence: Synthetic epitope
SLGEKELSST

SEQ ID NO: 46012 - protein, 10 aa, Artificial Sequence
  Description of Artificial Sequence: Synthetic epitope
SLGEMQQLQK

SEQ ID NO: 46013 - protein, 10 aa, Artificial Sequence
  Description of Artificial Sequence: Synthetic epitope
SLGEYPFDEN

SEQ ID NO: 46014 - protein, 10 aa, Artificial Sequence
  Description of Artificial Sequence: Synthetic epitope
SLGGASRKEE

SEQ ID NO: 46015 - protein, 10 aa, Artificial Sequence
  Description of Artificial Sequence: Synthetic epitope
SLGIEVLSKQ

SEQ ID NO: 46016 - protein, 10 aa, Artificial Sequence
  Description of Artificial Sequence: Synthetic epitope
SLGKMAEVQV

SEQ ID NO: 46017 - protein, 10 aa, Artificial Sequence
  Description of Artificial Sequence: Synthetic epitope
SLGKREGIDQ

SEQ ID NO: 46018 - protein, 10 aa, Artificial Sequence
  Description of Artificial Sequence: Synthetic epitope
SLGLSLTNGL

SEQ ID NO: 46019 - protein, 10 aa, Artificial Sequence
  Description of Artificial Sequence: Synthetic epitope
SLGNTEKSTG

SEQ ID NO: 46020 - protein, 10 aa, Artificial Sequence
  Description of Artificial Sequence: Synthetic epitope
SLGRIRTRRQ

SEQ ID NO: 46021 - protein, 10 aa, Artificial Sequence
  Description of Artificial Sequence: Synthetic epitope
SLGRTRTEAH

SEQ ID NO: 46022 - protein, 10 aa, Artificial Sequence
  Description of Artificial Sequence: Synthetic epitope
SLGSLSKDQI

SEQ ID NO: 46023 - protein, 10 aa, Artificial Sequence
  Description of Artificial Sequence: Synthetic epitope
SLGSNEEKSK

SEQ ID NO: 46024 - protein, 10 aa, Artificial Sequence
  Description of Artificial Sequence: Synthetic epitope
SLGSSISATT

SEQ ID NO: 46025 - protein, 10 aa, Artificial Sequence
  Description of Artificial Sequence: Synthetic epitope
SLGTSATNSV

SEQ ID NO: 46026 - protein, 10 aa, Artificial Sequence
  Description of Artificial Sequence: Synthetic epitope
SLGVDSQIKK

SEQ ID NO: 46027 - protein, 10 aa, Artificial Sequence
  Description of Artificial Sequence: Synthetic epitope
SLHKASESQS

SEQ ID NO: 46028 - protein, 10 aa, Artificial Sequence
  Description of Artificial Sequence: Synthetic epitope
SLHQSQKQFQ

SEQ ID NO: 46029 - protein, 10 aa, Artificial Sequence
  Description of Artificial Sequence: Synthetic epitope
SLHVSKQLEK

SEQ ID NO: 46030 - protein, 10 aa, Artificial Sequence
  Description of Artificial Sequence: Synthetic epitope
SLIAEVLVKI

SEQ ID NO: 46031 - protein, 10 aa, Artificial Sequence
  Description of Artificial Sequence: Synthetic epitope
SLIAKSVRNY

SEQ ID NO: 46032 - protein, 10 aa, Artificial Sequence
  Description of Artificial Sequence: Synthetic epitope
SLIASIASLK

SEQ ID NO: 46033 - protein, 10 aa, Artificial Sequence
  Description of Artificial Sequence: Synthetic epitope
SLIDAFGLHE

SEQ ID NO: 46034 - protein, 10 aa, Artificial Sequence
  Description of Artificial Sequence: Synthetic epitope
SLIDTIDTVM

SEQ ID NO: 46035 - protein, 10 aa, Artificial Sequence
  Description of Artificial Sequence: Synthetic epitope
SLIEAQTAKA

SEQ ID NO: 46036 - protein, 10 aa, Artificial Sequence
  Description of Artificial Sequence: Synthetic epitope
SLIERMTALR

SEQ ID NO: 46037 - protein, 10 aa, Artificial Sequence
  Description of Artificial Sequence: Synthetic epitope
SLIEVDTSEH

SEQ ID NO: 46038 - protein, 10 aa, Artificial Sequence
  Description of Artificial Sequence: Synthetic epitope
SLIGTTVIEG

SEQ ID NO: 46039 - protein, 10 aa, Artificial Sequence
  Description of Artificial Sequence: Synthetic epitope
SLIISVEQLQ

SEQ ID NO: 46040 - protein, 10 aa, Artificial Sequence
  Description of Artificial Sequence: Synthetic epitope
SLIKLSKADV

SEQ ID NO: 46041 - protein, 10 aa, Artificial Sequence
  Description of Artificial Sequence: Synthetic epitope
SLIKSVAGVI

SEQ ID NO: 46042 - protein, 10 aa, Artificial Sequence
  Description of Artificial Sequence: Synthetic epitope
SLILDAVSNN

SEQ ID NO: 46043 - protein, 10 aa, Artificial Sequence
  Description of Artificial Sequence: Synthetic epitope
SLILNSSQDS

SEQ ID NO: 46044 - protein, 10 aa, Artificial Sequence
  Description of Artificial Sequence: Synthetic epitope
SLIQELSVAY

SEQ ID NO: 46045 - protein, 10 aa, Artificial Sequence
  Description of Artificial Sequence: Synthetic epitope
SLISSRGEEA

SEQ ID NO: 46046 - protein, 10 aa, Artificial Sequence
  Description of Artificial Sequence: Synthetic epitope
SLISVKDTSA

SEQ ID NO: 46047 - protein, 10 aa, Artificial Sequence
  Description of Artificial Sequence: Synthetic epitope
SLITASQFFE

SEQ ID NO: 46048 - protein, 10 aa, Artificial Sequence
  Description of Artificial Sequence: Synthetic epitope
SLITPKSTFL

SEQ ID NO: 46049 - protein, 10 aa, Artificial Sequence
  Description of Artificial Sequence: Synthetic epitope
SLKAAMPVEA

SEQ ID NO: 46050 - protein, 10 aa, Artificial Sequence
  Description of Artificial Sequence: Synthetic epitope
SLKDAMAQHE

SEQ ID NO: 46051 - protein, 10 aa, Artificial Sequence
  Description of Artificial Sequence: Synthetic epitope
SLKEAEVLLK

SEQ ID NO: 46052 - protein, 10 aa, Artificial Sequence
  Description of Artificial Sequence: Synthetic epitope
SLKEEHRAYD

SEQ ID NO: 46053 - protein, 10 aa, Artificial Sequence
  Description of Artificial Sequence: Synthetic epitope
SLKEKVNTAQ

SEQ ID NO: 46054 - protein, 10 aa, Artificial Sequence
  Description of Artificial Sequence: Synthetic epitope
SLKEKWNAKS

SEQ ID NO: 46055 - protein, 10 aa, Artificial Sequence
  Description of Artificial Sequence: Synthetic epitope
SLKERAISGL

SEQ ID NO: 46056 - protein, 10 aa, Artificial Sequence
  Description of Artificial Sequence: Synthetic epitope
SLKEVEETLT

SEQ ID NO: 46057 - protein, 10 aa, Artificial Sequence
  Description of Artificial Sequence: Synthetic epitope
SLKFRSEERP

SEQ ID NO: 46058 - protein, 10 aa, Artificial Sequence
  Description of Artificial Sequence: Synthetic epitope
SLKKMLIRHK

SEQ ID NO: 46059 - protein, 10 aa, Artificial Sequence
  Description of Artificial Sequence: Synthetic epitope
SLKKMMNVAE

SEQ ID NO: 46060 - protein, 10 aa, Artificial Sequence
  Description of Artificial Sequence: Synthetic epitope
SLKKQRSRSI

SEQ ID NO: 46061 - protein, 10 aa, Artificial Sequence
  Description of Artificial Sequence: Synthetic epitope
SLKKVSGIKE

SEQ ID NO: 46062 - protein, 10 aa, Artificial Sequence
  Description of Artificial Sequence: Synthetic epitope
SLKLTKIPER

SEQ ID NO: 46063 - protein, 10 aa, Artificial Sequence
  Description of Artificial Sequence: Synthetic epitope
SLKLVIQSTG

SEQ ID NO: 46064 - protein, 10 aa, Artificial Sequence
  Description of Artificial Sequence: Synthetic epitope
SLKMMASEPL

SEQ ID NO: 46065 - protein, 10 aa, Artificial Sequence
  Description of Artificial Sequence: Synthetic epitope
SLKQAALVKA

SEQ ID NO: 46066 - protein, 10 aa, Artificial Sequence
  Description of Artificial Sequence: Synthetic epitope
SLKRLKQARK

SEQ ID NO: 46067 - protein, 10 aa, Artificial Sequence
  Description of Artificial Sequence: Synthetic epitope
SLKRLVTRRK

SEQ ID NO: 46068 - protein, 10 aa, Artificial Sequence
  Description of Artificial Sequence: Synthetic epitope
SLKSEFVPST

SEQ ID NO: 46069 - protein, 10 aa, Artificial Sequence
  Description of Artificial Sequence: Synthetic epitope
SLKSIREFAA

SEQ ID NO: 46070 - protein, 10 aa, Artificial Sequence
  Description of Artificial Sequence: Synthetic epitope
SLKSNVTSLD

SEQ ID NO: 46071 - protein, 10 aa, Artificial Sequence
  Description of Artificial Sequence: Synthetic epitope
SLKTISRAFM

SEQ ID NO: 46072 - protein, 10 aa, Artificial Sequence
  Description of Artificial Sequence: Synthetic epitope
SLKTISRAFM

SEQ ID NO: 46073 - protein, 10 aa, Artificial Sequence
  Description of Artificial Sequence: Synthetic epitope
SLKYIQSNRK

SEQ ID NO: 46074 - protein, 10 aa, Artificial Sequence
  Description of Artificial Sequence: Synthetic epitope
SLLADDSQTS

SEQ ID NO: 46075 - protein, 10 aa, Artificial Sequence
  Description of Artificial Sequence: Synthetic epitope
SLLAEAISQE

SEQ ID NO: 46076 - protein, 10 aa, Artificial Sequence
  Description of Artificial Sequence: Synthetic epitope
SLLAKVAAGK

SEQ ID NO: 46077 - protein, 10 aa, Artificial Sequence
  Description of Artificial Sequence: Synthetic epitope
SLLAQAQAQA

SEQ ID NO: 46078 - protein, 10 aa, Artificial Sequence
  Description of Artificial Sequence: Synthetic epitope
SLLAQAQAQA

SEQ ID NO: 46079 - protein, 10 aa, Artificial Sequence
  Description of Artificial Sequence: Synthetic epitope
SLLASELTKD

SEQ ID NO: 46080 - protein, 10 aa, Artificial Sequence
  Description of Artificial Sequence: Synthetic epitope
SLLEAAKEWE

SEQ ID NO: 46081 - protein, 10 aa, Artificial Sequence
  Description of Artificial Sequence: Synthetic epitope
SLLEAEATAE

SEQ ID NO: 46082 - protein, 10 aa, Artificial Sequence
  Description of Artificial Sequence: Synthetic epitope
SLLERIITKS

SEQ ID NO: 46083 - protein, 10 aa, Artificial Sequence
  Description of Artificial Sequence: Synthetic epitope
SLLERKQVRP

SEQ ID NO: 46084 - protein, 10 aa, Artificial Sequence
  Description of Artificial Sequence: Synthetic epitope
SLLERVSAEA

SEQ ID NO: 46085 - protein, 10 aa, Artificial Sequence
  Description of Artificial Sequence: Synthetic epitope
SLLETNEIPS

SEQ ID NO: 46086 - protein, 10 aa, Artificial Sequence
  Description of Artificial Sequence: Synthetic epitope
SLLFKILSSV

SEQ ID NO: 46087 - protein, 10 aa, Artificial Sequence
  Description of Artificial Sequence: Synthetic epitope
SLLGKMNSEE

SEQ ID NO: 46088 - protein, 10 aa, Artificial Sequence
  Description of Artificial Sequence: Synthetic epitope
SLLGKVIASK

SEQ ID NO: 46089 - protein, 10 aa, Artificial Sequence
  Description of Artificial Sequence: Synthetic epitope
SLLGTEIIEN

SEQ ID NO: 46090 - protein, 10 aa, Artificial Sequence
  Description of Artificial Sequence: Synthetic epitope
SLLKLKAEKN

SEQ ID NO: 46091 - protein, 10 aa, Artificial Sequence
  Description of Artificial Sequence: Synthetic epitope
SLLKPSTKAL

SEQ ID NO: 46092 - protein, 10 aa, Artificial Sequence
  Description of Artificial Sequence: Synthetic epitope
SLLKSVLQSP

SEQ ID NO: 46093 - protein, 10 aa, Artificial Sequence
  Description of Artificial Sequence: Synthetic epitope
SLLKYSASKK

SEQ ID NO: 46094 - protein, 10 aa, Artificial Sequence
  Description of Artificial Sequence: Synthetic epitope
SLLPEEIKSS

SEQ ID NO: 46095 - protein, 10 aa, Artificial Sequence
  Description of Artificial Sequence: Synthetic epitope
SLLQAVRLGR

SEQ ID NO: 46096 - protein, 10 aa, Artificial Sequence
  Description of Artificial Sequence: Synthetic epitope
SLLQLLGSRT

SEQ ID NO: 46097 - protein, 10 aa, Artificial Sequence
  Description of Artificial Sequence: Synthetic epitope
SLLQSTSYKD

SEQ ID NO: 46098 - protein, 10 aa, Artificial Sequence
  Description of Artificial Sequence: Synthetic epitope
SLLRERRADH

SEQ ID NO: 46099 - protein, 10 aa, Artificial Sequence
  Description of Artificial Sequence: Synthetic epitope
SLLRETESKS

SEQ ID NO: 46100 - protein, 10 aa, Artificial Sequence
  Description of Artificial Sequence: Synthetic epitope
SLLRKLTTAS

SEQ ID NO: 46101 - protein, 10 aa, Artificial Sequence
  Description of Artificial Sequence: Synthetic epitope
SLLRQSEGSN

SEQ ID NO: 46102 - protein, 10 aa, Artificial Sequence
  Description of Artificial Sequence: Synthetic epitope
SLLRSLSDKL

SEQ ID NO: 46103 - protein, 10 aa, Artificial Sequence
  Description of Artificial Sequence: Synthetic epitope
SLLRSRLSQL

SEQ ID NO: 46104 - protein, 10 aa, Artificial Sequence
  Description of Artificial Sequence: Synthetic epitope
SLLSARSFPR

SEQ ID NO: 46105 - protein, 10 aa, Artificial Sequence
  Description of Artificial Sequence: Synthetic epitope
SLLSEKLTSS

SEQ ID NO: 46106 - protein, 10 aa, Artificial Sequence
  Description of Artificial Sequence: Synthetic epitope
SLLSKARGID

SEQ ID NO: 46107 - protein, 10 aa, Artificial Sequence
  Description of Artificial Sequence: Synthetic epitope
SLLSKMKVAI

SEQ ID NO: 46108 - protein, 10 aa, Artificial Sequence
  Description of Artificial Sequence: Synthetic epitope
SLLSLAITTE

SEQ ID NO: 46109 - protein, 10 aa, Artificial Sequence
  Description of Artificial Sequence: Synthetic epitope
SLLSLLHTQD

SEQ ID NO: 46110 - protein, 10 aa, Artificial Sequence
  Description of Artificial Sequence: Synthetic epitope
SLLSQVFVKL

SEQ ID NO: 46111 - protein, 10 aa, Artificial Sequence
  Description of Artificial Sequence: Synthetic epitope
SLLSRVVAQY

SEQ ID NO: 46112 - protein, 10 aa, Artificial Sequence
  Description of Artificial Sequence: Synthetic epitope
SLLSSPASAA

SEQ ID NO: 46113 - protein, 10 aa, Artificial Sequence
  Description of Artificial Sequence: Synthetic epitope
SLLSTTAEDS

SEQ ID NO: 46114 - protein, 10 aa, Artificial Sequence
  Description of Artificial Sequence: Synthetic epitope
SLLSVSQSQN

SEQ ID NO: 46115 - protein, 10 aa, Artificial Sequence
  Description of Artificial Sequence: Synthetic epitope
SLLTESRNFN

SEQ ID NO: 46116 - protein, 10 aa, Artificial Sequence
  Description of Artificial Sequence: Synthetic epitope
SLLTQASTLM

SEQ ID NO: 46117 - protein, 10 aa, Artificial Sequence
  Description of Artificial Sequence: Synthetic epitope
SLLTSRQLPI

SEQ ID NO: 46118 - protein, 10 aa, Artificial Sequence
  Description of Artificial Sequence: Synthetic epitope
SLLVAGLKKE

SEQ ID NO: 46119 - protein, 10 aa, Artificial Sequence
  Description of Artificial Sequence: Synthetic epitope
SLLVASDAQI

SEQ ID NO: 46120 - protein, 10 aa, Artificial Sequence
  Description of Artificial Sequence: Synthetic epitope
SLMFSSRTKM

SEQ ID NO: 46121 - protein, 10 aa, Artificial Sequence
  Description of Artificial Sequence: Synthetic epitope
SLMGKNVQRE

SEQ ID NO: 46122 - protein, 10 aa, Artificial Sequence
  Description of Artificial Sequence: Synthetic epitope
SLMGSQPAGS

SEQ ID NO: 46123 - protein, 10 aa, Artificial Sequence
  Description of Artificial Sequence: Synthetic epitope
SLMHSEFAQL

SEQ ID NO: 46124 - protein, 10 aa, Artificial Sequence
  Description of Artificial Sequence: Synthetic epitope
SLMKTSAIKK

SEQ ID NO: 46125 - protein, 10 aa, Artificial Sequence
  Description of Artificial Sequence: Synthetic epitope
SLMMVEKVPD

SEQ ID NO: 46126 - protein, 10 aa, Artificial Sequence
  Description of Artificial Sequence: Synthetic epitope
SLMNLTSTPL

SEQ ID NO: 46127 - protein, 10 aa, Artificial Sequence
  Description of Artificial Sequence: Synthetic epitope
SLMSKSNSML

SEQ ID NO: 46128 - protein, 10 aa, Artificial Sequence
  Description of Artificial Sequence: Synthetic epitope
SLMSTEKTKG

SEQ ID NO: 46129 - protein, 10 aa, Artificial Sequence
  Description of Artificial Sequence: Synthetic epitope
SLMTAKLSTS

SEQ ID NO: 46130 - protein, 10 aa, Artificial Sequence
  Description of Artificial Sequence: Synthetic epitope
SLMTNPVSIN

SEQ ID NO: 46131 - protein, 10 aa, Artificial Sequence
  Description of Artificial Sequence: Synthetic epitope
SLMTSSQYPK

SEQ ID NO: 46132 - protein, 10 aa, Artificial Sequence
  Description of Artificial Sequence: Synthetic epitope
SLNAGSLTMS

SEQ ID NO: 46133 - protein, 10 aa, Artificial Sequence
  Description of Artificial Sequence: Synthetic epitope
SLNATSAAYV

SEQ ID NO: 46134 - protein, 10 aa, Artificial Sequence
  Description of Artificial Sequence: Synthetic epitope
SLNEERNLTK

SEQ ID NO: 46135 - protein, 10 aa, Artificial Sequence
  Description of Artificial Sequence: Synthetic epitope
SLNESSAEVL

SEQ ID NO: 46136 - protein, 10 aa, Artificial Sequence
  Description of Artificial Sequence: Synthetic epitope
SLNHAASKKL

SEQ ID NO: 46137 - protein, 10 aa, Artificial Sequence
  Description of Artificial Sequence: Synthetic epitope
SLNIGRAKGS

SEQ ID NO: 46138 - protein, 10 aa, Artificial Sequence
  Description of Artificial Sequence: Synthetic epitope
SLNKDSAKVG

SEQ ID NO: 46139 - protein, 10 aa, Artificial Sequence
  Description of Artificial Sequence: Synthetic epitope
SLNKSKSATT

SEQ ID NO: 46140 - protein, 10 aa, Artificial Sequence
  Description of Artificial Sequence: Synthetic epitope
SLNKVPTKKN

SEQ ID NO: 46141 - protein, 10 aa, Artificial Sequence
  Description of Artificial Sequence: Synthetic epitope
SLNMISSNPQ

SEQ ID NO: 46142 - protein, 10 aa, Artificial Sequence
  Description of Artificial Sequence: Synthetic epitope
SLNNIIKAAT

SEQ ID NO: 46143 - protein, 10 aa, Artificial Sequence
  Description of Artificial Sequence: Synthetic epitope
SLNPEVKSND

SEQ ID NO: 46144 - protein, 10 aa, Artificial Sequence
  Description of Artificial Sequence: Synthetic epitope
SLNPLALISR

SEQ ID NO: 46145 - protein, 10 aa, Artificial Sequence
  Description of Artificial Sequence: Synthetic epitope
SLNQAADDHA

SEQ ID NO: 46146 - protein, 10 aa, Artificial Sequence
  Description of Artificial Sequence: Synthetic epitope
SLNQAVVSKL

SEQ ID NO: 46147 - protein, 10 aa, Artificial Sequence
  Description of Artificial Sequence: Synthetic epitope
SLNQKVKQTK

SEQ ID NO: 46148 - protein, 10 aa, Artificial Sequence
  Description of Artificial Sequence: Synthetic epitope
SLNQQTKALQ

SEQ ID NO: 46149 - protein, 10 aa, Artificial Sequence
  Description of Artificial Sequence: Synthetic epitope
SLNQSALSRP

SEQ ID NO: 46150 - protein, 10 aa, Artificial Sequence
  Description of Artificial Sequence: Synthetic epitope
SLNRKNTELN

SEQ ID NO: 46151 - protein, 10 aa, Artificial Sequence
  Description of Artificial Sequence: Synthetic epitope
SLNRLDLDSS

SEQ ID NO: 46152 - protein, 10 aa, Artificial Sequence
  Description of Artificial Sequence: Synthetic epitope
SLNSASPVAM

SEQ ID NO: 46153 - protein, 10 aa, Artificial Sequence
  Description of Artificial Sequence: Synthetic epitope
SLNSLQLVSE

SEQ ID NO: 46154 - protein, 10 aa, Artificial Sequence
  Description of Artificial Sequence: Synthetic epitope
SLNSNLKKDE

SEQ ID NO: 46155 - protein, 10 aa, Artificial Sequence
  Description of Artificial Sequence: Synthetic epitope
SLNSQDSSIE

SEQ ID NO: 46156 - protein, 10 aa, Artificial Sequence
  Description of Artificial Sequence: Synthetic epitope
SLNSQLQQLQ

SEQ ID NO: 46157 - protein, 10 aa, Artificial Sequence
  Description of Artificial Sequence: Synthetic epitope
SLNSTRSHER

SEQ ID NO: 46158 - protein, 10 aa, Artificial Sequence
  Description of Artificial Sequence: Synthetic epitope
SLNTDQTTAS

SEQ ID NO: 46159 - protein, 10 aa, Artificial Sequence
  Description of Artificial Sequence: Synthetic epitope
SLNTSQYTYE

SEQ ID NO: 46160 - protein, 10 aa, Artificial Sequence
  Description of Artificial Sequence: Synthetic epitope
SLNTVASADS

SEQ ID NO: 46161 - protein, 10 aa, Artificial Sequence
  Description of Artificial Sequence: Synthetic epitope
SLNVASDSIA

SEQ ID NO: 46162 - protein, 10 aa, Artificial Sequence
  Description of Artificial Sequence: Synthetic epitope
SLPAEVSSDN

SEQ ID NO: 46163 - protein, 10 aa, Artificial Sequence
  Description of Artificial Sequence: Synthetic epitope
SLPELSASAE

SEQ ID NO: 46164 - protein, 10 aa, Artificial Sequence
  Description of Artificial Sequence: Synthetic epitope
SLPLSSNLQS

SEQ ID NO: 46165 - protein, 10 aa, Artificial Sequence
  Description of Artificial Sequence: Synthetic epitope
SLPSKSSKWD

SEQ ID NO: 46166 - protein, 10 aa, Artificial Sequence
  Description of Artificial Sequence: Synthetic epitope
SLPTMTVSDW

SEQ ID NO: 46167 - protein, 10 aa, Artificial Sequence
  Description of Artificial Sequence: Synthetic epitope
SLPTSSKVNA

SEQ ID NO: 46168 - protein, 10 aa, Artificial Sequence
  Description of Artificial Sequence: Synthetic epitope
SLPTVEKWYQ

SEQ ID NO: 46169 - protein, 10 aa, Artificial Sequence
  Description of Artificial Sequence: Synthetic epitope
SLPTVSPSNE

SEQ ID NO: 46170 - protein, 10 aa, Artificial Sequence
  Description of Artificial Sequence: Synthetic epitope
SLPVSDSVLS

SEQ ID NO: 46171 - protein, 10 aa, Artificial Sequence
  Description of Artificial Sequence: Synthetic epitope
SLQADTTNTD

SEQ ID NO: 46172 - protein, 10 aa, Artificial Sequence
  Description of Artificial Sequence: Synthetic epitope
SLQAERLKKH

SEQ ID NO: 46173 - protein, 10 aa, Artificial Sequence
  Description of Artificial Sequence: Synthetic epitope
SLQATLQVIS

SEQ ID NO: 46174 - protein, 10 aa, Artificial Sequence
  Description of Artificial Sequence: Synthetic epitope
SLQDTVALDH

SEQ ID NO: 46175 - protein, 10 aa, Artificial Sequence
  Description of Artificial Sequence: Synthetic epitope
SLQDVGQSAA

SEQ ID NO: 46176 - protein, 10 aa, Artificial Sequence
  Description of Artificial Sequence: Synthetic epitope
SLQEKKDQNR

SEQ ID NO: 46177 - protein, 10 aa, Artificial Sequence
  Description of Artificial Sequence: Synthetic epitope
SLQEKVSKKE

SEQ ID NO: 46178 - protein, 10 aa, Artificial Sequence
  Description of Artificial Sequence: Synthetic epitope
SLQELSTEQK

SEQ ID NO: 46179 - protein, 10 aa, Artificial Sequence
  Description of Artificial Sequence: Synthetic epitope
SLQEYIVSAR

SEQ ID NO: 46180 - protein, 10 aa, Artificial Sequence
  Description of Artificial Sequence: Synthetic epitope
SLQHKAASSI

SEQ ID NO: 46181 - protein, 10 aa, Artificial Sequence
  Description of Artificial Sequence: Synthetic epitope
SLQKASRFTH

SEQ ID NO: 46182 - protein, 10 aa, Artificial Sequence
  Description of Artificial Sequence: Synthetic epitope
SLQLNRVSLE

SEQ ID NO: 46183 - protein, 10 aa, Artificial Sequence
  Description of Artificial Sequence: Synthetic epitope
SLQLSKAESK

SEQ ID NO: 46184 - protein, 10 aa, Artificial Sequence
  Description of Artificial Sequence: Synthetic epitope
SLQLSKAESK

SEQ ID NO: 46185 - protein, 10 aa, Artificial Sequence
  Description of Artificial Sequence: Synthetic epitope
SLQLSKAESK

SEQ ID NO: 46186 - protein, 10 aa, Artificial Sequence
  Description of Artificial Sequence: Synthetic epitope
SLQNAEKTMQ

SEQ ID NO: 46187 - protein, 10 aa, Artificial Sequence
  Description of Artificial Sequence: Synthetic epitope
SLQNRAEVDK

SEQ ID NO: 46188 - protein, 10 aa, Artificial Sequence
  Description of Artificial Sequence: Synthetic epitope
SLQQAASRSP

SEQ ID NO: 46189 - protein, 10 aa, Artificial Sequence
  Description of Artificial Sequence: Synthetic epitope
SLQQAQAFYT

SEQ ID NO: 46190 - protein, 10 aa, Artificial Sequence
  Description of Artificial Sequence: Synthetic epitope
SLQRGLELTQ

SEQ ID NO: 46191 - protein, 10 aa, Artificial Sequence
  Description of Artificial Sequence: Synthetic epitope
SLQRKSRNQQ

SEQ ID NO: 46192 - protein, 10 aa, Artificial Sequence
  Description of Artificial Sequence: Synthetic epitope
SLQSASDQPQ

SEQ ID NO: 46193 - protein, 10 aa, Artificial Sequence
  Description of Artificial Sequence: Synthetic epitope
SLQSKHSTEN

SEQ ID NO: 46194 - protein, 10 aa, Artificial Sequence
  Description of Artificial Sequence: Synthetic epitope
SLQSNATGEE

SEQ ID NO: 46195 - protein, 10 aa, Artificial Sequence
  Description of Artificial Sequence: Synthetic epitope
SLQTDSSNTD

SEQ ID NO: 46196 - protein, 10 aa, Artificial Sequence
  Description of Artificial Sequence: Synthetic epitope
SLQTSDSTVP

SEQ ID NO: 46197 - protein, 10 aa, Artificial Sequence
  Description of Artificial Sequence: Synthetic epitope
SLQVQAVTPQ

SEQ ID NO: 46198 - protein, 10 aa, Artificial Sequence
  Description of Artificial Sequence: Synthetic epitope
SLQVVHVETH

SEQ ID NO: 46199 - protein, 10 aa, Artificial Sequence
  Description of Artificial Sequence: Synthetic epitope
SLQYKKNQIE

SEQ ID NO: 46200 - protein, 10 aa, Artificial Sequence
  Description of Artificial Sequence: Synthetic epitope
SLRALGSTRA

SEQ ID NO: 46201 - protein, 10 aa, Artificial Sequence
  Description of Artificial Sequence: Synthetic epitope
SLRAPARNAV

SEQ ID NO: 46202 - protein, 10 aa, Artificial Sequence
  Description of Artificial Sequence: Synthetic epitope
SLRASTSKSE

SEQ ID NO: 46203 - protein, 10 aa, Artificial Sequence
  Description of Artificial Sequence: Synthetic epitope
SLRDTAASLR

SEQ ID NO: 46204 - protein, 10 aa, Artificial Sequence
  Description of Artificial Sequence: Synthetic epitope
SLREVAENAR

SEQ ID NO: 46205 - protein, 10 aa, Artificial Sequence
  Description of Artificial Sequence: Synthetic epitope
SLRFMVLTSE

SEQ ID NO: 46206 - protein, 10 aa, Artificial Sequence
  Description of Artificial Sequence: Synthetic epitope
SLRLLSALRF

SEQ ID NO: 46207 - protein, 10 aa, Artificial Sequence
  Description of Artificial Sequence: Synthetic epitope
SLRNSSKVTE

SEQ ID NO: 46208 - protein, 10 aa, Artificial Sequence
  Description of Artificial Sequence: Synthetic epitope
SLRQLLEADI

SEQ ID NO: 46209 - protein, 10 aa, Artificial Sequence
  Description of Artificial Sequence: Synthetic epitope
SLRQTNKTKQ

SEQ ID NO: 46210 - protein, 10 aa, Artificial Sequence
  Description of Artificial Sequence: Synthetic epitope
SLRRSKRNSD

SEQ ID NO: 46211 - protein, 10 aa, Artificial Sequence
  Description of Artificial Sequence: Synthetic epitope
SLRRSRFSES

SEQ ID NO: 46212 - protein, 10 aa, Artificial Sequence
  Description of Artificial Sequence: Synthetic epitope
SLRSTTLEKE

SEQ ID NO: 46213 - protein, 10 aa, Artificial Sequence
  Description of Artificial Sequence: Synthetic epitope
SLRTTVQGVS

SEQ ID NO: 46214 - protein, 10 aa, Artificial Sequence
  Description of Artificial Sequence: Synthetic epitope
SLRTTVQGVS

SEQ ID NO: 46215 - protein, 10 aa, Artificial Sequence
  Description of Artificial Sequence: Synthetic epitope
SLRWPAKEVG

SEQ ID NO: 46216 - protein, 10 aa, Artificial Sequence
  Description of Artificial Sequence: Synthetic epitope
SLSAETQDFA

SEQ ID NO: 46217 - protein, 10 aa, Artificial Sequence
  Description of Artificial Sequence: Synthetic epitope
SLSAKGQLTN

SEQ ID NO: 46218 - protein, 10 aa, Artificial Sequence
  Description of Artificial Sequence: Synthetic epitope
SLSAMELAEQ

SEQ ID NO: 46219 - protein, 10 aa, Artificial Sequence
  Description of Artificial Sequence: Synthetic epitope
SLSAPHESFS

SEQ ID NO: 46220 - protein, 10 aa, Artificial Sequence
  Description of Artificial Sequence: Synthetic epitope
SLSAPSKKTS

SEQ ID NO: 46221 - protein, 10 aa, Artificial Sequence
  Description of Artificial Sequence: Synthetic epitope
SLSASPVSNL

SEQ ID NO: 46222 - protein, 10 aa, Artificial Sequence
  Description of Artificial Sequence: Synthetic epitope
SLSAYGRRTS

SEQ ID NO: 46223 - protein, 10 aa, Artificial Sequence
  Description of Artificial Sequence: Synthetic epitope
SLSDNFAATA

SEQ ID NO: 46224 - protein, 10 aa, Artificial Sequence
  Description of Artificial Sequence: Synthetic epitope
SLSDSTEDEE

SEQ ID NO: 46225 - protein, 10 aa, Artificial Sequence
  Description of Artificial Sequence: Synthetic epitope
SLSDSTRTRL

SEQ ID NO: 46226 - protein, 10 aa, Artificial Sequence
  Description of Artificial Sequence: Synthetic epitope
SLSDSVITSL

SEQ ID NO: 46227 - protein, 10 aa, Artificial Sequence
  Description of Artificial Sequence: Synthetic epitope
SLSEAITARD

SEQ ID NO: 46228 - protein, 10 aa, Artificial Sequence
  Description of Artificial Sequence: Synthetic epitope
SLSEEHLALS

SEQ ID NO: 46229 - protein, 10 aa, Artificial Sequence
  Description of Artificial Sequence: Synthetic epitope
SLSEPATQQA

SEQ ID NO: 46230 - protein, 10 aa, Artificial Sequence
  Description of Artificial Sequence: Synthetic epitope
SLSEPQEHRY

SEQ ID NO: 46231 - protein, 10 aa, Artificial Sequence
  Description of Artificial Sequence: Synthetic epitope
SLSEQQNDKN

SEQ ID NO: 46232 - protein, 10 aa, Artificial Sequence
  Description of Artificial Sequence: Synthetic epitope
SLSESESTKG

SEQ ID NO: 46233 - protein, 10 aa, Artificial Sequence
  Description of Artificial Sequence: Synthetic epitope
SLSESSTDEE

SEQ ID NO: 46234 - protein, 10 aa, Artificial Sequence
  Description of Artificial Sequence: Synthetic epitope
SLSFVMLTSK

SEQ ID NO: 46235 - protein, 10 aa, Artificial Sequence
  Description of Artificial Sequence: Synthetic epitope
SLSGKSIQEL

SEQ ID NO: 46236 - protein, 10 aa, Artificial Sequence
  Description of Artificial Sequence: Synthetic epitope
SLSGREKMMA

SEQ ID NO: 46237 - protein, 10 aa, Artificial Sequence
  Description of Artificial Sequence: Synthetic epitope
SLSGSHSGET

SEQ ID NO: 46238 - protein, 10 aa, Artificial Sequence
  Description of Artificial Sequence: Synthetic epitope
SLSIPQLDGT

SEQ ID NO: 46239 - protein, 10 aa, Artificial Sequence
  Description of Artificial Sequence: Synthetic epitope
SLSISITSRL

SEQ ID NO: 46240 - protein, 10 aa, Artificial Sequence
  Description of Artificial Sequence: Synthetic epitope
SLSKKALAGT

SEQ ID NO: 46241 - protein, 10 aa, Artificial Sequence
  Description of Artificial Sequence: Synthetic epitope
SLSLARANSG

SEQ ID NO: 46242 - protein, 10 aa, Artificial Sequence
  Description of Artificial Sequence: Synthetic epitope
SLSLAVTKWG

SEQ ID NO: 46243 - protein, 10 aa, Artificial Sequence
  Description of Artificial Sequence: Synthetic epitope
SLSLESPLLG

SEQ ID NO: 46244 - protein, 10 aa, Artificial Sequence
  Description of Artificial Sequence: Synthetic epitope
SLSLESTDRG

SEQ ID NO: 46245 - protein, 10 aa, Artificial Sequence
  Description of Artificial Sequence: Synthetic epitope
SLSLHSESKV

SEQ ID NO: 46246 - protein, 10 aa, Artificial Sequence
  Description of Artificial Sequence: Synthetic epitope
SLSLKEETEQ

SEQ ID NO: 46247 - protein, 10 aa, Artificial Sequence
  Description of Artificial Sequence: Synthetic epitope
SLSLKTILRS

SEQ ID NO: 46248 - protein, 10 aa, Artificial Sequence
  Description of Artificial Sequence: Synthetic epitope
SLSLKYRDGA

SEQ ID NO: 46249 - protein, 10 aa, Artificial Sequence
  Description of Artificial Sequence: Synthetic epitope
SLSLQMQSME

SEQ ID NO: 46250 - protein, 10 aa, Artificial Sequence
  Description of Artificial Sequence: Synthetic epitope
SLSLSEFEEG

SEQ ID NO: 46251 - protein, 10 aa, Artificial Sequence
  Description of Artificial Sequence: Synthetic epitope
SLSMGAKSAG

SEQ ID NO: 46252 - protein, 10 aa, Artificial Sequence
  Description of Artificial Sequence: Synthetic epitope
SLSMGINKSE

SEQ ID NO: 46253 - protein, 10 aa, Artificial Sequence
  Description of Artificial Sequence: Synthetic epitope
SLSNVSSERT

SEQ ID NO: 46254 - protein, 10 aa, Artificial Sequence
  Description of Artificial Sequence: Synthetic epitope
SLSQDDKINK

SEQ ID NO: 46255 - protein, 10 aa, Artificial Sequence
  Description of Artificial Sequence: Synthetic epitope
SLSQSAENVP

SEQ ID NO: 46256 - protein, 10 aa, Artificial Sequence
  Description of Artificial Sequence: Synthetic epitope
SLSQSSQRPN

SEQ ID NO: 46257 - protein, 10 aa, Artificial Sequence
  Description of Artificial Sequence: Synthetic epitope
SLSQYQLMKH

SEQ ID NO: 46258 - protein, 10 aa, Artificial Sequence
  Description of Artificial Sequence: Synthetic epitope
SLSRESSLQY

SEQ ID NO: 46259 - protein, 10 aa, Artificial Sequence
  Description of Artificial Sequence: Synthetic epitope
SLSRGSGYKE

SEQ ID NO: 46260 - protein, 10 aa, Artificial Sequence
  Description of Artificial Sequence: Synthetic epitope
SLSRISLTQA

SEQ ID NO: 46261 - protein, 10 aa, Artificial Sequence
  Description of Artificial Sequence: Synthetic epitope
SLSRRSISKE

SEQ ID NO: 46262 - protein, 10 aa, Artificial Sequence
  Description of Artificial Sequence: Synthetic epitope
SLSSAEYEAR

SEQ ID NO: 46263 - protein, 10 aa, Artificial Sequence
  Description of Artificial Sequence: Synthetic epitope
SLSSAMKLMP

SEQ ID NO: 46264 - protein, 10 aa, Artificial Sequence
  Description of Artificial Sequence: Synthetic epitope
SLSSASNDTH

SEQ ID NO: 46265 - protein, 10 aa, Artificial Sequence
  Description of Artificial Sequence: Synthetic epitope
SLSSEEQQAV

SEQ ID NO: 46266 - protein, 10 aa, Artificial Sequence
  Description of Artificial Sequence: Synthetic epitope
SLSSGVIQEA

SEQ ID NO: 46267 - protein, 10 aa, Artificial Sequence
  Description of Artificial Sequence: Synthetic epitope
SLSSKIEAIL

SEQ ID NO: 46268 - protein, 10 aa, Artificial Sequence
  Description of Artificial Sequence: Synthetic epitope
SLSSKPLVVL

SEQ ID NO: 46269 - protein, 10 aa, Artificial Sequence
  Description of Artificial Sequence: Synthetic epitope
SLSSPTSVLG

SEQ ID NO: 46270 - protein, 10 aa, Artificial Sequence
  Description of Artificial Sequence: Synthetic epitope
SLSSVQQLGI

SEQ ID NO: 46271 - protein, 10 aa, Artificial Sequence
  Description of Artificial Sequence: Synthetic epitope
SLSTAAVKET

SEQ ID NO: 46272 - protein, 10 aa, Artificial Sequence
  Description of Artificial Sequence: Synthetic epitope
SLSTAQLVQP

SEQ ID NO: 46273 - protein, 10 aa, Artificial Sequence
  Description of Artificial Sequence: Synthetic epitope
SLSTKLHSRA

SEQ ID NO: 46274 - protein, 10 aa, Artificial Sequence
  Description of Artificial Sequence: Synthetic epitope
SLSTMKAIVE

SEQ ID NO: 46275 - protein, 10 aa, Artificial Sequence
  Description of Artificial Sequence: Synthetic epitope
SLSTSKLNSL

SEQ ID NO: 46276 - protein, 10 aa, Artificial Sequence
  Description of Artificial Sequence: Synthetic epitope
SLSTVDTEGV

SEQ ID NO: 46277 - protein, 10 aa, Artificial Sequence
  Description of Artificial Sequence: Synthetic epitope
SLSVALKFSQ

SEQ ID NO: 46278 - protein, 10 aa, Artificial Sequence
  Description of Artificial Sequence: Synthetic epitope
SLTAAERRLH

SEQ ID NO: 46279 - protein, 10 aa, Artificial Sequence
  Description of Artificial Sequence: Synthetic epitope
SLTALSLASA

SEQ ID NO: 46280 - protein, 10 aa, Artificial Sequence
  Description of Artificial Sequence: Synthetic epitope
SLTAREVMST

SEQ ID NO: 46281 - protein, 10 aa, Artificial Sequence
  Description of Artificial Sequence: Synthetic epitope
SLTDSSLSDD

SEQ ID NO: 46282 - protein, 10 aa, Artificial Sequence
  Description of Artificial Sequence: Synthetic epitope
SLTDTQVQKL

SEQ ID NO: 46283 - protein, 10 aa, Artificial Sequence
  Description of Artificial Sequence: Synthetic epitope
SLTEAVLPKL

SEQ ID NO: 46284 - protein, 10 aa, Artificial Sequence
  Description of Artificial Sequence: Synthetic epitope
SLTETKTTVE

SEQ ID NO: 46285 - protein, 10 aa, Artificial Sequence
  Description of Artificial Sequence: Synthetic epitope
SLTETNTESS

SEQ ID NO: 46286 - protein, 10 aa, Artificial Sequence
  Description of Artificial Sequence: Synthetic epitope
SLTEVDDSGQ

SEQ ID NO: 46287 - protein, 10 aa, Artificial Sequence
  Description of Artificial Sequence: Synthetic epitope
SLTGSFLEGS

SEQ ID NO: 46288 - protein, 10 aa, Artificial Sequence
  Description of Artificial Sequence: Synthetic epitope
SLTKKTLQNR

SEQ ID NO: 46289 - protein, 10 aa, Artificial Sequence
  Description of Artificial Sequence: Synthetic epitope
SLTLDQSQSQ

SEQ ID NO: 46290 - protein, 10 aa, Artificial Sequence
  Description of Artificial Sequence: Synthetic epitope
SLTQVRREND

SEQ ID NO: 46291 - protein, 10 aa, Artificial Sequence
  Description of Artificial Sequence: Synthetic epitope
SLTRASSKRE

SEQ ID NO: 46292 - protein, 10 aa, Artificial Sequence
  Description of Artificial Sequence: Synthetic epitope
SLTSAEKVGE

SEQ ID NO: 46293 - protein, 10 aa, Artificial Sequence
  Description of Artificial Sequence: Synthetic epitope
SLTSSNISKW

SEQ ID NO: 46294 - protein, 10 aa, Artificial Sequence
  Description of Artificial Sequence: Synthetic epitope
SLTSVIKSPA

SEQ ID NO: 46295 - protein, 10 aa, Artificial Sequence
  Description of Artificial Sequence: Synthetic epitope
SLTTKPETRA

SEQ ID NO: 46296 - protein, 10 aa, Artificial Sequence
  Description of Artificial Sequence: Synthetic epitope
SLTTLSHGTT

SEQ ID NO: 46297 - protein, 10 aa, Artificial Sequence
  Description of Artificial Sequence: Synthetic epitope
SLTTMLLSST

SEQ ID NO: 46298 - protein, 10 aa, Artificial Sequence
  Description of Artificial Sequence: Synthetic epitope
SLTTSSTHKR

SEQ ID NO: 46299 - protein, 10 aa, Artificial Sequence
  Description of Artificial Sequence: Synthetic epitope
SLTTSSTHKS

SEQ ID NO: 46300 - protein, 10 aa, Artificial Sequence
  Description of Artificial Sequence: Synthetic epitope
SLVAETSITS

SEQ ID NO: 46301 - protein, 10 aa, Artificial Sequence
  Description of Artificial Sequence: Synthetic epitope
SLVALMELKV

SEQ ID NO: 46302 - protein, 10 aa, Artificial Sequence
  Description of Artificial Sequence: Synthetic epitope
SLVASGKAEL

SEQ ID NO: 46303 - protein, 10 aa, Artificial Sequence
  Description of Artificial Sequence: Synthetic epitope
SLVATNAARL

SEQ ID NO: 46304 - protein, 10 aa, Artificial Sequence
  Description of Artificial Sequence: Synthetic epitope
SLVAVELEKV

SEQ ID NO: 46305 - protein, 10 aa, Artificial Sequence
  Description of Artificial Sequence: Synthetic epitope
SLVDRAQVKA

SEQ ID NO: 46306 - protein, 10 aa, Artificial Sequence
  Description of Artificial Sequence: Synthetic epitope
SLVDSQSDYR

SEQ ID NO: 46307 - protein, 10 aa, Artificial Sequence
  Description of Artificial Sequence: Synthetic epitope
SLVEYLAAVT

SEQ ID NO: 46308 - protein, 10 aa, Artificial Sequence
  Description of Artificial Sequence: Synthetic epitope
SLVIDSANAK

SEQ ID NO: 46309 - protein, 10 aa, Artificial Sequence
  Description of Artificial Sequence: Synthetic epitope
SLVIQMAHKE

SEQ ID NO: 46310 - protein, 10 aa, Artificial Sequence
  Description of Artificial Sequence: Synthetic epitope
SLVLDIIKLA

SEQ ID NO: 46311 - protein, 10 aa, Artificial Sequence
  Description of Artificial Sequence: Synthetic epitope
SLVPNDSHEE

SEQ ID NO: 46312 - protein, 10 aa, Artificial Sequence
  Description of Artificial Sequence: Synthetic epitope
SLVPQADTSQ

SEQ ID NO: 46313 - protein, 10 aa, Artificial Sequence
  Description of Artificial Sequence: Synthetic epitope
SLVRETQVLG

SEQ ID NO: 46314 - protein, 10 aa, Artificial Sequence
  Description of Artificial Sequence: Synthetic epitope
SLVRPLLVSA

SEQ ID NO: 46315 - protein, 10 aa, Artificial Sequence
  Description of Artificial Sequence: Synthetic epitope
SLVSDVVRPK

SEQ ID NO: 46316 - protein, 10 aa, Artificial Sequence
  Description of Artificial Sequence: Synthetic epitope
SLVSESLQQR

SEQ ID NO: 46317 - protein, 10 aa, Artificial Sequence
  Description of Artificial Sequence: Synthetic epitope
SLVSNVNGQP

SEQ ID NO: 46318 - protein, 10 aa, Artificial Sequence
  Description of Artificial Sequence: Synthetic epitope
SLVSTAETAK

SEQ ID NO: 46319 - protein, 10 aa, Artificial Sequence
  Description of Artificial Sequence: Synthetic epitope
SLVSTEDEED

SEQ ID NO: 46320 - protein, 10 aa, Artificial Sequence
  Description of Artificial Sequence: Synthetic epitope
SLVTSVTNVD

SEQ ID NO: 46321 - protein, 10 aa, Artificial Sequence
  Description of Artificial Sequence: Synthetic epitope
SLVVEREKQK

SEQ ID NO: 46322 - protein, 10 aa, Artificial Sequence
  Description of Artificial Sequence: Synthetic epitope
SLVVGQVSNN

SEQ ID NO: 46323 - protein, 10 aa, Artificial Sequence
  Description of Artificial Sequence: Synthetic epitope
SLVVRKEPDV

SEQ ID NO: 46324 - protein, 10 aa, Artificial Sequence
  Description of Artificial Sequence: Synthetic epitope
SLVVTATVKS

SEQ ID NO: 46325 - protein, 10 aa, Artificial Sequence
  Description of Artificial Sequence: Synthetic epitope
SLYGRKQSED

SEQ ID NO: 46326 - protein, 10 aa, Artificial Sequence
  Description of Artificial Sequence: Synthetic epitope
SLYKLTAHKH

SEQ ID NO: 46327 - protein, 10 aa, Artificial Sequence
  Description of Artificial Sequence: Synthetic epitope
SLYNKTSTIR

SEQ ID NO: 46328 - protein, 10 aa, Artificial Sequence
  Description of Artificial Sequence: Synthetic epitope
SLYTFDKAKQ

SEQ ID NO: 46329 - protein, 10 aa, Artificial Sequence
  Description of Artificial Sequence: Synthetic epitope
SLYTSMARPP

SEQ ID NO: 46330 - protein, 10 aa, Artificial Sequence
  Description of Artificial Sequence: Synthetic epitope
SMAADSIEVS

SEQ ID NO: 46331 - protein, 10 aa, Artificial Sequence
  Description of Artificial Sequence: Synthetic epitope
SMAEDTINAA

SEQ ID NO: 46332 - protein, 10 aa, Artificial Sequence
  Description of Artificial Sequence: Synthetic epitope
SMAEMTFNPP

SEQ ID NO: 46333 - protein, 10 aa, Artificial Sequence
  Description of Artificial Sequence: Synthetic epitope
SMAKKTVQSS

SEQ ID NO: 46334 - protein, 10 aa, Artificial Sequence
  Description of Artificial Sequence: Synthetic epitope
SMAQKRNYEN

SEQ ID NO: 46335 - protein, 10 aa, Artificial Sequence
  Description of Artificial Sequence: Synthetic epitope
SMASKLEAPF

SEQ ID NO: 46336 - protein, 10 aa, Artificial Sequence
  Description of Artificial Sequence: Synthetic epitope
SMATSYFGKQ

SEQ ID NO: 46337 - protein, 10 aa, Artificial Sequence
  Description of Artificial Sequence: Synthetic epitope
SMDEHNAALR

SEQ ID NO: 46338 - protein, 10 aa, Artificial Sequence
  Description of Artificial Sequence: Synthetic epitope
SMDRGNSQTF

SEQ ID NO: 46339 - protein, 10 aa, Artificial Sequence
  Description of Artificial Sequence: Synthetic epitope
SMDSARSKQL

SEQ ID NO: 46340 - protein, 10 aa, Artificial Sequence
  Description of Artificial Sequence: Synthetic epitope
SMDSEDKVTE

SEQ ID NO: 46341 - protein, 10 aa, Artificial Sequence
  Description of Artificial Sequence: Synthetic epitope
SMEFITLSRL

SEQ ID NO: 46342 - protein, 10 aa, Artificial Sequence
  Description of Artificial Sequence: Synthetic epitope
SMEGASPLSE

SEQ ID NO: 46343 - protein, 10 aa, Artificial Sequence
  Description of Artificial Sequence: Synthetic epitope
SMEIDLEDDV

SEQ ID NO: 46344 - protein, 10 aa, Artificial Sequence
  Description of Artificial Sequence: Synthetic epitope
SMEIKPNVVA

SEQ ID NO: 46345 - protein, 10 aa, Artificial Sequence
  Description of Artificial Sequence: Synthetic epitope
SMENTVTRNS

SEQ ID NO: 46346 - protein, 10 aa, Artificial Sequence
  Description of Artificial Sequence: Synthetic epitope
SMEPNKQKNV

SEQ ID NO: 46347 - protein, 10 aa, Artificial Sequence
  Description of Artificial Sequence: Synthetic epitope
SMETTSIGKN

SEQ ID NO: 46348 - protein, 10 aa, Artificial Sequence
  Description of Artificial Sequence: Synthetic epitope
SMEVKANDFH

SEQ ID NO: 46349 - protein, 10 aa, Artificial Sequence
  Description of Artificial Sequence: Synthetic epitope
SMEVLSETSS

SEQ ID NO: 46350 - protein, 10 aa, Artificial Sequence
  Description of Artificial Sequence: Synthetic epitope
SMGHRESSQP

SEQ ID NO: 46351 - protein, 10 aa, Artificial Sequence
  Description of Artificial Sequence: Synthetic epitope
SMGISGLQQD

SEQ ID NO: 46352 - protein, 10 aa, Artificial Sequence
  Description of Artificial Sequence: Synthetic epitope
SMGLTKSKNQ

SEQ ID NO: 46353 - protein, 10 aa, Artificial Sequence
  Description of Artificial Sequence: Synthetic epitope
SMGSEMAGNE

SEQ ID NO: 46354 - protein, 10 aa, Artificial Sequence
  Description of Artificial Sequence: Synthetic epitope
SMGTSVTGLY

SEQ ID NO: 46355 - protein, 10 aa, Artificial Sequence
  Description of Artificial Sequence: Synthetic epitope
SMHQVEEDYL

SEQ ID NO: 46356 - protein, 10 aa, Artificial Sequence
  Description of Artificial Sequence: Synthetic epitope
SMIDAATSQR

SEQ ID NO: 46357 - protein, 10 aa, Artificial Sequence
  Description of Artificial Sequence: Synthetic epitope
SMIEEAAGTR

SEQ ID NO: 46358 - protein, 10 aa, Artificial Sequence
  Description of Artificial Sequence: Synthetic epitope
SMKEELTKAT

SEQ ID NO: 46359 - protein, 10 aa, Artificial Sequence
  Description of Artificial Sequence: Synthetic epitope
SMKISSMGEL

SEQ ID NO: 46360 - protein, 10 aa, Artificial Sequence
  Description of Artificial Sequence: Synthetic epitope
SMKLSMMIQE

SEQ ID NO: 46361 - protein, 10 aa, Artificial Sequence
  Description of Artificial Sequence: Synthetic epitope
SMKPNKYGVI

SEQ ID NO: 46362 - protein, 10 aa, Artificial Sequence
  Description of Artificial Sequence: Synthetic epitope
SMKVEMSSGD

SEQ ID NO: 46363 - protein, 10 aa, Artificial Sequence
  Description of Artificial Sequence: Synthetic epitope
SMLLTSETTF

SEQ ID NO: 46364 - protein, 10 aa, Artificial Sequence
  Description of Artificial Sequence: Synthetic epitope
SMLPESVKSK

SEQ ID NO: 46365 - protein, 10 aa, Artificial Sequence
  Description of Artificial Sequence: Synthetic epitope
SMLSEGSDAS

SEQ ID NO: 46366 - protein, 10 aa, Artificial Sequence
  Description of Artificial Sequence: Synthetic epitope
SMLTSKTSTQ

SEQ ID NO: 46367 - protein, 10 aa, Artificial Sequence
  Description of Artificial Sequence: Synthetic epitope
SMLYSRMNIK

SEQ ID NO: 46368 - protein, 10 aa, Artificial Sequence
  Description of Artificial Sequence: Synthetic epitope
SMLYSTAKGA

SEQ ID NO: 46369 - protein, 10 aa, Artificial Sequence
  Description of Artificial Sequence: Synthetic epitope
SMMESKDVHK

SEQ ID NO: 46370 - protein, 10 aa, Artificial Sequence
  Description of Artificial Sequence: Synthetic epitope
SMMSESDNSK

SEQ ID NO: 46371 - protein, 10 aa, Artificial Sequence
  Description of Artificial Sequence: Synthetic epitope
SMMSKLSHKH

SEQ ID NO: 46372 - protein, 10 aa, Artificial Sequence
  Description of Artificial Sequence: Synthetic epitope
SMMTTQVLSL

SEQ ID NO: 46373 - protein, 10 aa, Artificial Sequence
  Description of Artificial Sequence: Synthetic epitope
SMNASEFSEV

SEQ ID NO: 46374 - protein, 10 aa, Artificial Sequence
  Description of Artificial Sequence: Synthetic epitope
SMNPVEKEHT

SEQ ID NO: 46375 - protein, 10 aa, Artificial Sequence
  Description of Artificial Sequence: Synthetic epitope
SMNSVSKLIH

SEQ ID NO: 46376 - protein, 10 aa, Artificial Sequence
  Description of Artificial Sequence: Synthetic epitope
SMNVSFAHLH

SEQ ID NO: 46377 - protein, 10 aa, Artificial Sequence
  Description of Artificial Sequence: Synthetic epitope
SMPGGRLQSE

SEQ ID NO: 46378 - protein, 10 aa, Artificial Sequence
  Description of Artificial Sequence: Synthetic epitope
SMPIASSRGD

SEQ ID NO: 46379 - protein, 10 aa, Artificial Sequence
  Description of Artificial Sequence: Synthetic epitope
SMPMSEVSQV

SEQ ID NO: 46380 - protein, 10 aa, Artificial Sequence
  Description of Artificial Sequence: Synthetic epitope
SMQAKMLEQR

SEQ ID NO: 46381 - protein, 10 aa, Artificial Sequence
  Description of Artificial Sequence: Synthetic epitope
SMQEVMDESS

SEQ ID NO: 46382 - protein, 10 aa, Artificial Sequence
  Description of Artificial Sequence: Synthetic epitope
SMQKNEKIKY

SEQ ID NO: 46383 - protein, 10 aa, Artificial Sequence
  Description of Artificial Sequence: Synthetic epitope
SMQMKLMEMK

SEQ ID NO: 46384 - protein, 10 aa, Artificial Sequence
  Description of Artificial Sequence: Synthetic epitope
SMQNYPSTRS

SEQ ID NO: 46385 - protein, 10 aa, Artificial Sequence
  Description of Artificial Sequence: Synthetic epitope
SMQSTTGLQK

SEQ ID NO: 46386 - protein, 10 aa, Artificial Sequence
  Description of Artificial Sequence: Synthetic epitope
SMQSTTGLQK

SEQ ID NO: 46387 - protein, 10 aa, Artificial Sequence
  Description of Artificial Sequence: Synthetic epitope
SMREHVLNLA

SEQ ID NO: 46388 - protein, 10 aa, Artificial Sequence
  Description of Artificial Sequence: Synthetic epitope
SMRKAQVSPQ

SEQ ID NO: 46389 - protein, 10 aa, Artificial Sequence
  Description of Artificial Sequence: Synthetic epitope
SMRLRLLNEE

SEQ ID NO: 46390 - protein, 10 aa, Artificial Sequence
  Description of Artificial Sequence: Synthetic epitope
SMRNNSSDVD

SEQ ID NO: 46391 - protein, 10 aa, Artificial Sequence
  Description of Artificial Sequence: Synthetic epitope
SMRSWSDMRQ

SEQ ID NO: 46392 - protein, 10 aa, Artificial Sequence
  Description of Artificial Sequence: Synthetic epitope
SMSASVSLQK

SEQ ID NO: 46393 - protein, 10 aa, Artificial Sequence
  Description of Artificial Sequence: Synthetic epitope
SMSDLEMEPD

SEQ ID NO: 46394 - protein, 10 aa, Artificial Sequence
  Description of Artificial Sequence: Synthetic epitope
SMSEEDQMMR

SEQ ID NO: 46395 - protein, 10 aa, Artificial Sequence
  Description of Artificial Sequence: Synthetic epitope
SMSETIKYND

SEQ ID NO: 46396 - protein, 10 aa, Artificial Sequence
  Description of Artificial Sequence: Synthetic epitope
SMSGLTHVTS

SEQ ID NO: 46397 - protein, 10 aa, Artificial Sequence
  Description of Artificial Sequence: Synthetic epitope
SMSGNNLAEI

SEQ ID NO: 46398 - protein, 10 aa, Artificial Sequence
  Description of Artificial Sequence: Synthetic epitope
SMSGVSNNPQ

SEQ ID NO: 46399 - protein, 10 aa, Artificial Sequence
  Description of Artificial Sequence: Synthetic epitope
SMSLAKKDEK

SEQ ID NO: 46400 - protein, 10 aa, Artificial Sequence
  Description of Artificial Sequence: Synthetic epitope
SMSLGTTREK

SEQ ID NO: 46401 - protein, 10 aa, Artificial Sequence
  Description of Artificial Sequence: Synthetic epitope
SMSNAGWQVK

SEQ ID NO: 46402 - protein, 10 aa, Artificial Sequence
  Description of Artificial Sequence: Synthetic epitope
SMSNGNSSAT

SEQ ID NO: 46403 - protein, 10 aa, Artificial Sequence
  Description of Artificial Sequence: Synthetic epitope
SMSNRSDKAE

SEQ ID NO: 46404 - protein, 10 aa, Artificial Sequence
  Description of Artificial Sequence: Synthetic epitope
SMSPKLEGGK

SEQ ID NO: 46405 - protein, 10 aa, Artificial Sequence
  Description of Artificial Sequence: Synthetic epitope
SMSQPSQMSQ

SEQ ID NO: 46406 - protein, 10 aa, Artificial Sequence
  Description of Artificial Sequence: Synthetic epitope
SMSSAEEQFQ

SEQ ID NO: 46407 - protein, 10 aa, Artificial Sequence
  Description of Artificial Sequence: Synthetic epitope
SMSTSTTSAV

SEQ ID NO: 46408 - protein, 10 aa, Artificial Sequence
  Description of Artificial Sequence: Synthetic epitope
SMSTVVSTKT

SEQ ID NO: 46409 - protein, 10 aa, Artificial Sequence
  Description of Artificial Sequence: Synthetic epitope
SMSVQDNESN

SEQ ID NO: 46410 - protein, 10 aa, Artificial Sequence
  Description of Artificial Sequence: Synthetic epitope
SMTAESSPRS

SEQ ID NO: 46411 - protein, 10 aa, Artificial Sequence
  Description of Artificial Sequence: Synthetic epitope
SMTFKVEKPE

SEQ ID NO: 46412 - protein, 10 aa, Artificial Sequence
  Description of Artificial Sequence: Synthetic epitope
SMTGGTNKTS

SEQ ID NO: 46413 - protein, 10 aa, Artificial Sequence
  Description of Artificial Sequence: Synthetic epitope
SMTLQSQKFQ

SEQ ID NO: 46414 - protein, 10 aa, Artificial Sequence
  Description of Artificial Sequence: Synthetic epitope
SMTSAAQAAL

SEQ ID NO: 46415 - protein, 10 aa, Artificial Sequence
  Description of Artificial Sequence: Synthetic epitope
SMTSLATSQH

SEQ ID NO: 46416 - protein, 10 aa, Artificial Sequence
  Description of Artificial Sequence: Synthetic epitope
SMTSVDDTET

SEQ ID NO: 46417 - protein, 10 aa, Artificial Sequence
  Description of Artificial Sequence: Synthetic epitope
SMTVASSAPT

SEQ ID NO: 46418 - protein, 10 aa, Artificial Sequence
  Description of Artificial Sequence: Synthetic epitope
SMVFTTSKSH

SEQ ID NO: 46419 - protein, 10 aa, Artificial Sequence
  Description of Artificial Sequence: Synthetic epitope
SMVGAEQVRW

SEQ ID NO: 46420 - protein, 10 aa, Artificial Sequence
  Description of Artificial Sequence: Synthetic epitope
SMVLPQVIGY

SEQ ID NO: 46421 - protein, 10 aa, Artificial Sequence
  Description of Artificial Sequence: Synthetic epitope
SMVLTKVSAS

SEQ ID NO: 46422 - protein, 10 aa, Artificial Sequence
  Description of Artificial Sequence: Synthetic epitope
SMVNTDDVNA

SEQ ID NO: 46423 - protein, 10 aa, Artificial Sequence
  Description of Artificial Sequence: Synthetic epitope
SMVRKAKYRE

SEQ ID NO: 46424 - protein, 10 aa, Artificial Sequence
  Description of Artificial Sequence: Synthetic epitope
SMVSLKRSPS

SEQ ID NO: 46425 - protein, 10 aa, Artificial Sequence
  Description of Artificial Sequence: Synthetic epitope
SMVSTSLNAE

SEQ ID NO: 46426 - protein, 10 aa, Artificial Sequence
  Description of Artificial Sequence: Synthetic epitope
SMVTATEVAP

SEQ ID NO: 46427 - protein, 10 aa, Artificial Sequence
  Description of Artificial Sequence: Synthetic epitope
SMWSEYTIGG

SEQ ID NO: 46428 - protein, 10 aa, Artificial Sequence
  Description of Artificial Sequence: Synthetic epitope
SMYAETAIAL

SEQ ID NO: 46429 - protein, 10 aa, Artificial Sequence
  Description of Artificial Sequence: Synthetic epitope
SMYQLELAVL

SEQ ID NO: 46430 - protein, 10 aa, Artificial Sequence
  Description of Artificial Sequence: Synthetic epitope
SMYSQELFQL

SEQ ID NO: 46431 - protein, 10 aa, Artificial Sequence
  Description of Artificial Sequence: Synthetic epitope
SMYSTLLAHK

SEQ ID NO: 46432 - protein, 10 aa, Artificial Sequence
  Description of Artificial Sequence: Synthetic epitope
SNAAQATASD

SEQ ID NO: 46433 - protein, 10 aa, Artificial Sequence
  Description of Artificial Sequence: Synthetic epitope
SNAAQATSPT

SEQ ID NO: 46434 - protein, 10 aa, Artificial Sequence
  Description of Artificial Sequence: Synthetic epitope
SNAESSTPKE

SEQ ID NO: 46435 - protein, 10 aa, Artificial Sequence
  Description of Artificial Sequence: Synthetic epitope
SNAGDPEIVK

SEQ ID NO: 46436 - protein, 10 aa, Artificial Sequence
  Description of Artificial Sequence: Synthetic epitope
SNAGLIVKSF

SEQ ID NO: 46437 - protein, 10 aa, Artificial Sequence
  Description of Artificial Sequence: Synthetic epitope
SNAIAAMTSS

SEQ ID NO: 46438 - protein, 10 aa, Artificial Sequence
  Description of Artificial Sequence: Synthetic epitope
SNAIDLVVAA

SEQ ID NO: 46439 - protein, 10 aa, Artificial Sequence
  Description of Artificial Sequence: Synthetic epitope
SNAISGMLQQ

SEQ ID NO: 46440 - protein, 10 aa, Artificial Sequence
  Description of Artificial Sequence: Synthetic epitope
SNAKVAASRK

SEQ ID NO: 46441 - protein, 10 aa, Artificial Sequence
  Description of Artificial Sequence: Synthetic epitope
SNALRNKKNS

SEQ ID NO: 46442 - protein, 10 aa, Artificial Sequence
  Description of Artificial Sequence: Synthetic epitope
SNAMSMIQAI

SEQ ID NO: 46443 - protein, 10 aa, Artificial Sequence
  Description of Artificial Sequence: Synthetic epitope
SNANIDRSPQ

SEQ ID NO: 46444 - protein, 10 aa, Artificial Sequence
  Description of Artificial Sequence: Synthetic epitope
SNANQTVPDR

SEQ ID NO: 46445 - protein, 10 aa, Artificial Sequence
  Description of Artificial Sequence: Synthetic epitope
SNASATESPP

SEQ ID NO: 46446 - protein, 10 aa, Artificial Sequence
  Description of Artificial Sequence: Synthetic epitope
SNASEMEMEI

SEQ ID NO: 46447 - protein, 10 aa, Artificial Sequence
  Description of Artificial Sequence: Synthetic epitope
SNASSASAPA

SEQ ID NO: 46448 - protein, 10 aa, Artificial Sequence
  Description of Artificial Sequence: Synthetic epitope
SNATAIDSQI

SEQ ID NO: 46449 - protein, 10 aa, Artificial Sequence
  Description of Artificial Sequence: Synthetic epitope
SNATLVSYIV

SEQ ID NO: 46450 - protein, 10 aa, Artificial Sequence
  Description of Artificial Sequence: Synthetic epitope
SNATTVQHEV

SEQ ID NO: 46451 - protein, 10 aa, Artificial Sequence
  Description of Artificial Sequence: Synthetic epitope
SNAYEAKEVV

SEQ ID NO: 46452 - protein, 10 aa, Artificial Sequence
  Description of Artificial Sequence: Synthetic epitope
SNDRNKGPQL

SEQ ID NO: 46453 - protein, 10 aa, Artificial Sequence
  Description of Artificial Sequence: Synthetic epitope
SNEANEANEA

SEQ ID NO: 46454 - protein, 10 aa, Artificial Sequence
  Description of Artificial Sequence: Synthetic epitope
SNEATKSDLQ

SEQ ID NO: 46455 - protein, 10 aa, Artificial Sequence
  Description of Artificial Sequence: Synthetic epitope
SNEESMDLSN

SEQ ID NO: 46456 - protein, 10 aa, Artificial Sequence
  Description of Artificial Sequence: Synthetic epitope
SNEETSTEKT

SEQ ID NO: 46457 - protein, 10 aa, Artificial Sequence
  Description of Artificial Sequence: Synthetic epitope
SNEGELSFTS

SEQ ID NO: 46458 - protein, 10 aa, Artificial Sequence
  Description of Artificial Sequence: Synthetic epitope
SNEGIELRSF

SEQ ID NO: 46459 - protein, 10 aa, Artificial Sequence
  Description of Artificial Sequence: Synthetic epitope
SNEGVMNHRS

SEQ ID NO: 46460 - protein, 10 aa, Artificial Sequence
  Description of Artificial Sequence: Synthetic epitope
SNEILPYANF

SEQ ID NO: 46461 - protein, 10 aa, Artificial Sequence
  Description of Artificial Sequence: Synthetic epitope
SNEKEDLMNG

SEQ ID NO: 46462 - protein, 10 aa, Artificial Sequence
  Description of Artificial Sequence: Synthetic epitope
SNEKTTQQSS

SEQ ID NO: 46463 - protein, 10 aa, Artificial Sequence
  Description of Artificial Sequence: Synthetic epitope
SNEMKAKNKD

SEQ ID NO: 46464 - protein, 10 aa, Artificial Sequence
  Description of Artificial Sequence: Synthetic epitope
SNENSKQYEI

SEQ ID NO: 46465 - protein, 10 aa, Artificial Sequence
  Description of Artificial Sequence: Synthetic epitope
SNEPEVVSVA

SEQ ID NO: 46466 - protein, 10 aa, Artificial Sequence
  Description of Artificial Sequence: Synthetic epitope
SNEQRTESSD

SEQ ID NO: 46467 - protein, 10 aa, Artificial Sequence
  Description of Artificial Sequence: Synthetic epitope
SNERIALTPF

SEQ ID NO: 46468 - protein, 10 aa, Artificial Sequence
  Description of Artificial Sequence: Synthetic epitope
SNERRSLANE

SEQ ID NO: 46469 - protein, 10 aa, Artificial Sequence
  Description of Artificial Sequence: Synthetic epitope
SNESVDYRAT

SEQ ID NO: 46470 - protein, 10 aa, Artificial Sequence
  Description of Artificial Sequence: Synthetic epitope
SNETSTSANT

SEQ ID NO: 46471 - protein, 10 aa, Artificial Sequence
  Description of Artificial Sequence: Synthetic epitope
SNEVNEKAKK

SEQ ID NO: 46472 - protein, 10 aa, Artificial Sequence
  Description of Artificial Sequence: Synthetic epitope
SNFERSSTVG

SEQ ID NO: 46473 - protein, 10 aa, Artificial Sequence
  Description of Artificial Sequence: Synthetic epitope
SNFIGLFVKE

SEQ ID NO: 46474 - protein, 10 aa, Artificial Sequence
  Description of Artificial Sequence: Synthetic epitope
SNFINFIDKL

SEQ ID NO: 46475 - protein, 10 aa, Artificial Sequence
  Description of Artificial Sequence: Synthetic epitope
SNFKKALNRF

SEQ ID NO: 46476 - protein, 10 aa, Artificial Sequence
  Description of Artificial Sequence: Synthetic epitope
SNFNHVVQNE

SEQ ID NO: 46477 - protein, 10 aa, Artificial Sequence
  Description of Artificial Sequence: Synthetic epitope
SNFSSAMPRN

SEQ ID NO: 46478 - protein, 10 aa, Artificial Sequence
  Description of Artificial Sequence: Synthetic epitope
SNFSSIKPEP

SEQ ID NO: 46479 - protein, 10 aa, Artificial Sequence
  Description of Artificial Sequence: Synthetic epitope
SNFVIEDSVT

SEQ ID NO: 46480 - protein, 10 aa, Artificial Sequence
  Description of Artificial Sequence: Synthetic epitope
SNGDAKVMDG

SEQ ID NO: 46481 - protein, 10 aa, Artificial Sequence
  Description of Artificial Sequence: Synthetic epitope
SNGDSDSNRQ

SEQ ID NO: 46482 - protein, 10 aa, Artificial Sequence
  Description of Artificial Sequence: Synthetic epitope
SNGKAAVQRS

SEQ ID NO: 46483 - protein, 10 aa, Artificial Sequence
  Description of Artificial Sequence: Synthetic epitope
SNGKFVTSKK

SEQ ID NO: 46484 - protein, 10 aa, Artificial Sequence
  Description of Artificial Sequence: Synthetic epitope
SNGKKEVLSG

SEQ ID NO: 46485 - protein, 10 aa, Artificial Sequence
  Description of Artificial Sequence: Synthetic epitope
SNGLSVQTVV

SEQ ID NO: 46486 - protein, 10 aa, Artificial Sequence
  Description of Artificial Sequence: Synthetic epitope
SNGSQYSGSR

SEQ ID NO: 46487 - protein, 10 aa, Artificial Sequence
  Description of Artificial Sequence: Synthetic epitope
SNGTRRIPVS

SEQ ID NO: 46488 - protein, 10 aa, Artificial Sequence
  Description of Artificial Sequence: Synthetic epitope
SNGVTQKASA

SEQ ID NO: 46489 - protein, 10 aa, Artificial Sequence
  Description of Artificial Sequence: Synthetic epitope
SNGVTQKASA

SEQ ID NO: 46490 - protein, 10 aa, Artificial Sequence
  Description of Artificial Sequence: Synthetic epitope
SNHANEKVEM

SEQ ID NO: 46491 - protein, 10 aa, Artificial Sequence
  Description of Artificial Sequence: Synthetic epitope
SNHGHARKRA

SEQ ID NO: 46492 - protein, 10 aa, Artificial Sequence
  Description of Artificial Sequence: Synthetic epitope
SNHGSQNGLD

SEQ ID NO: 46493 - protein, 10 aa, Artificial Sequence
  Description of Artificial Sequence: Synthetic epitope
SNHHSNEVGA

SEQ ID NO: 46494 - protein, 10 aa, Artificial Sequence
  Description of Artificial Sequence: Synthetic epitope
SNHVSNVTVN

SEQ ID NO: 46495 - protein, 10 aa, Artificial Sequence
  Description of Artificial Sequence: Synthetic epitope
SNHVWGFNDV

SEQ ID NO: 46496 - protein, 10 aa, Artificial Sequence
  Description of Artificial Sequence: Synthetic epitope
SNIDEKEDKN

SEQ ID NO: 46497 - protein, 10 aa, Artificial Sequence
  Description of Artificial Sequence: Synthetic epitope
SNIESTLSAL

SEQ ID NO: 46498 - protein, 10 aa, Artificial Sequence
  Description of Artificial Sequence: Synthetic epitope
SNIGNSPTEG

SEQ ID NO: 46499 - protein, 10 aa, Artificial Sequence
  Description of Artificial Sequence: Synthetic epitope
SNIIGQSVEE

SEQ ID NO: 46500 - protein, 10 aa, Artificial Sequence
  Description of Artificial Sequence: Synthetic epitope
SNIILISSDH

SEQ ID NO: 46501 - protein, 10 aa, Artificial Sequence
  Description of Artificial Sequence: Synthetic epitope
SNIKLNSEEV

SEQ ID NO: 46502 - protein, 10 aa, Artificial Sequence
  Description of Artificial Sequence: Synthetic epitope
SNIKTLDDLF

SEQ ID NO: 46503 - protein, 10 aa, Artificial Sequence
  Description of Artificial Sequence: Synthetic epitope
SNINYPESHR

SEQ ID NO: 46504 - protein, 10 aa, Artificial Sequence
  Description of Artificial Sequence: Synthetic epitope
SNIPRSNVTP

SEQ ID NO: 46505 - protein, 10 aa, Artificial Sequence
  Description of Artificial Sequence: Synthetic epitope
SNIPSAAGVS

SEQ ID NO: 46506 - protein, 10 aa, Artificial Sequence
  Description of Artificial Sequence: Synthetic epitope
SNISSKEGTY

SEQ ID NO: 46507 - protein, 10 aa, Artificial Sequence
  Description of Artificial Sequence: Synthetic epitope
SNIVKTAPKV

SEQ ID NO: 46508 - protein, 10 aa, Artificial Sequence
  Description of Artificial Sequence: Synthetic epitope
SNIVLAVMEK

SEQ ID NO: 46509 - protein, 10 aa, Artificial Sequence
  Description of Artificial Sequence: Synthetic epitope
SNIVSATSVQ

SEQ ID NO: 46510 - protein, 10 aa, Artificial Sequence
  Description of Artificial Sequence: Synthetic epitope
SNKDQSNKPV

SEQ ID NO: 46511 - protein, 10 aa, Artificial Sequence
  Description of Artificial Sequence: Synthetic epitope
SNKDSQSEGT

SEQ ID NO: 46512 - protein, 10 aa, Artificial Sequence
  Description of Artificial Sequence: Synthetic epitope
SNKEQLTATK

SEQ ID NO: 46513 - protein, 10 aa, Artificial Sequence
  Description of Artificial Sequence: Synthetic epitope
SNKESQQLVQ

SEQ ID NO: 46514 - protein, 10 aa, Artificial Sequence
  Description of Artificial Sequence: Synthetic epitope
SNKEVYAKLS

SEQ ID NO: 46515 - protein, 10 aa, Artificial Sequence
  Description of Artificial Sequence: Synthetic epitope
SNKIVIQDEI

SEQ ID NO: 46516 - protein, 10 aa, Artificial Sequence
  Description of Artificial Sequence: Synthetic epitope
SNKKASDAEK

SEQ ID NO: 46517 - protein, 10 aa, Artificial Sequence
  Description of Artificial Sequence: Synthetic epitope
SNKKTSTLKH

SEQ ID NO: 46518 - protein, 10 aa, Artificial Sequence
  Description of Artificial Sequence: Synthetic epitope
SNKPFARIVD

SEQ ID NO: 46519 - protein, 10 aa, Artificial Sequence
  Description of Artificial Sequence: Synthetic epitope
SNKQKKLLKQ

SEQ ID NO: 46520 - protein, 10 aa, Artificial Sequence
  Description of Artificial Sequence: Synthetic epitope
SNKRSRSGSQ

SEQ ID NO: 46521 - protein, 10 aa, Artificial Sequence
  Description of Artificial Sequence: Synthetic epitope
SNKSANVPAL

SEQ ID NO: 46522 - protein, 10 aa, Artificial Sequence
  Description of Artificial Sequence: Synthetic epitope
SNKSATTDNE

SEQ ID NO: 46523 - protein, 10 aa, Artificial Sequence
  Description of Artificial Sequence: Synthetic epitope
SNKSSTLERK

SEQ ID NO: 46524 - protein, 10 aa, Artificial Sequence
  Description of Artificial Sequence: Synthetic epitope
SNKSYYSKHL

SEQ ID NO: 46525 - protein, 10 aa, Artificial Sequence
  Description of Artificial Sequence: Synthetic epitope
SNKTTRQASL

SEQ ID NO: 46526 - protein, 10 aa, Artificial Sequence
  Description of Artificial Sequence: Synthetic epitope
SNKTTSSKNM

SEQ ID NO: 46527 - protein, 10 aa, Artificial Sequence
  Description of Artificial Sequence: Synthetic epitope
SNKVEAIDVE

SEQ ID NO: 46528 - protein, 10 aa, Artificial Sequence
  Description of Artificial Sequence: Synthetic epitope
SNLEKIVNPK

SEQ ID NO: 46529 - protein, 10 aa, Artificial Sequence
  Description of Artificial Sequence: Synthetic epitope
SNLETKQVQG

SEQ ID NO: 46530 - protein, 10 aa, Artificial Sequence
  Description of Artificial Sequence: Synthetic epitope
SNLEYVKYAK

SEQ ID NO: 46531 - protein, 10 aa, Artificial Sequence
  Description of Artificial Sequence: Synthetic epitope
SNLKTKVKTA

SEQ ID NO: 46532 - protein, 10 aa, Artificial Sequence
  Description of Artificial Sequence: Synthetic epitope
SNLLEEMKAT

SEQ ID NO: 46533 - protein, 10 aa, Artificial Sequence
  Description of Artificial Sequence: Synthetic epitope
SNLLTEAAVE

SEQ ID NO: 46534 - protein, 10 aa, Artificial Sequence
  Description of Artificial Sequence: Synthetic epitope
SNLQNKLEVL

SEQ ID NO: 46535 - protein, 10 aa, Artificial Sequence
  Description of Artificial Sequence: Synthetic epitope
SNLSQSTLDI

SEQ ID NO: 46536 - protein, 10 aa, Artificial Sequence
  Description of Artificial Sequence: Synthetic epitope
SNLSSEASAR

SEQ ID NO: 46537 - protein, 10 aa, Artificial Sequence
  Description of Artificial Sequence: Synthetic epitope
SNLSSKFQFS

SEQ ID NO: 46538 - protein, 10 aa, Artificial Sequence
  Description of Artificial Sequence: Synthetic epitope
SNLTRAVKEE

SEQ ID NO: 46539 - protein, 10 aa, Artificial Sequence
  Description of Artificial Sequence: Synthetic epitope
SNLTSTLSGG

SEQ ID NO: 46540 - protein, 10 aa, Artificial Sequence
  Description of Artificial Sequence: Synthetic epitope
SNLVSAAFRS

SEQ ID NO: 46541 - protein, 10 aa, Artificial Sequence
  Description of Artificial Sequence: Synthetic epitope
SNLVVAAFRT

SEQ ID NO: 46542 - protein, 10 aa, Artificial Sequence
  Description of Artificial Sequence: Synthetic epitope
SNLYSQLERQ

SEQ ID NO: 46543 - protein, 10 aa, Artificial Sequence
  Description of Artificial Sequence: Synthetic epitope
SNMGNPMNTT

SEQ ID NO: 46544 - protein, 10 aa, Artificial Sequence
  Description of Artificial Sequence: Synthetic epitope
SNMIQADKIK

SEQ ID NO: 46545 - protein, 10 aa, Artificial Sequence
  Description of Artificial Sequence: Synthetic epitope
SNMLRWNQTH

SEQ ID NO: 46546 - protein, 10 aa, Artificial Sequence
  Description of Artificial Sequence: Synthetic epitope
SNMRPQSQTW

SEQ ID NO: 46547 - protein, 10 aa, Artificial Sequence
  Description of Artificial Sequence: Synthetic epitope
SNMTKGQELL

SEQ ID NO: 46548 - protein, 10 aa, Artificial Sequence
  Description of Artificial Sequence: Synthetic epitope
SNNFTHSRAK

SEQ ID NO: 46549 - protein, 10 aa, Artificial Sequence
  Description of Artificial Sequence: Synthetic epitope
SNNIRQLDDF

SEQ ID NO: 46550 - protein, 10 aa, Artificial Sequence
  Description of Artificial Sequence: Synthetic epitope
SNNITKVGVN

SEQ ID NO: 46551 - protein, 10 aa, Artificial Sequence
  Description of Artificial Sequence: Synthetic epitope
SNNITLREDQ

SEQ ID NO: 46552 - protein, 10 aa, Artificial Sequence
  Description of Artificial Sequence: Synthetic epitope
SNNITLREDQ

SEQ ID NO: 46553 - protein, 10 aa, Artificial Sequence
  Description of Artificial Sequence: Synthetic epitope
SNNITLREDQ

SEQ ID NO: 46554 - protein, 10 aa, Artificial Sequence
  Description of Artificial Sequence: Synthetic epitope
SNNLTNYGEK

SEQ ID NO: 46555 - protein, 10 aa, Artificial Sequence
  Description of Artificial Sequence: Synthetic epitope
SNNSATNRKT

SEQ ID NO: 46556 - protein, 10 aa, Artificial Sequence
  Description of Artificial Sequence: Synthetic epitope
SNNSIVEEDV

SEQ ID NO: 46557 - protein, 10 aa, Artificial Sequence
  Description of Artificial Sequence: Synthetic epitope
SNNSQQSNEQ

SEQ ID NO: 46558 - protein, 10 aa, Artificial Sequence
  Description of Artificial Sequence: Synthetic epitope
SNNSQVNKLT

SEQ ID NO: 46559 - protein, 10 aa, Artificial Sequence
  Description of Artificial Sequence: Synthetic epitope
SNNVHTSLSH

SEQ ID NO: 46560 - protein, 10 aa, Artificial Sequence
  Description of Artificial Sequence: Synthetic epitope
SNPAMVRRKK

SEQ ID NO: 46561 - protein, 10 aa, Artificial Sequence
  Description of Artificial Sequence: Synthetic epitope
SNPEPQINIT

SEQ ID NO: 46562 - protein, 10 aa, Artificial Sequence
  Description of Artificial Sequence: Synthetic epitope
SNPITTSKIT

SEQ ID NO: 46563 - protein, 10 aa, Artificial Sequence
  Description of Artificial Sequence: Synthetic epitope
SNPKASAKTK

SEQ ID NO: 46564 - protein, 10 aa, Artificial Sequence
  Description of Artificial Sequence: Synthetic epitope
SNPLRSDGMN

SEQ ID NO: 46565 - protein, 10 aa, Artificial Sequence
  Description of Artificial Sequence: Synthetic epitope
SNPVSRSSHQ

SEQ ID NO: 46566 - protein, 10 aa, Artificial Sequence
  Description of Artificial Sequence: Synthetic epitope
SNQENGVTEE

SEQ ID NO: 46567 - protein, 10 aa, Artificial Sequence
  Description of Artificial Sequence: Synthetic epitope
SNQGKQGGSA

SEQ ID NO: 46568 - protein, 10 aa, Artificial Sequence
  Description of Artificial Sequence: Synthetic epitope
SNQGNSQPQQ

SEQ ID NO: 46569 - protein, 10 aa, Artificial Sequence
  Description of Artificial Sequence: Synthetic epitope
SNQIQAKEYM

SEQ ID NO: 46570 - protein, 10 aa, Artificial Sequence
  Description of Artificial Sequence: Synthetic epitope
SNQIQTQRTA

SEQ ID NO: 46571 - protein, 10 aa, Artificial Sequence
  Description of Artificial Sequence: Synthetic epitope
SNQLDKSQKL

SEQ ID NO: 46572 - protein, 10 aa, Artificial Sequence
  Description of Artificial Sequence: Synthetic epitope
SNQNSKGREE

SEQ ID NO: 46573 - protein, 10 aa, Artificial Sequence
  Description of Artificial Sequence: Synthetic epitope
SNQNSSGSQV

SEQ ID NO: 46574 - protein, 10 aa, Artificial Sequence
  Description of Artificial Sequence: Synthetic epitope
SNQQSVSVQQ

SEQ ID NO: 46575 - protein, 10 aa, Artificial Sequence
  Description of Artificial Sequence: Synthetic epitope
SNQSDGTQES

SEQ ID NO: 46576 - protein, 10 aa, Artificial Sequence
  Description of Artificial Sequence: Synthetic epitope
SNQSKGTSAY

SEQ ID NO: 46577 - protein, 10 aa, Artificial Sequence
  Description of Artificial Sequence: Synthetic epitope
SNQSKLQQGT

SEQ ID NO: 46578 - protein, 10 aa, Artificial Sequence
  Description of Artificial Sequence: Synthetic epitope
SNQSTESTQD

SEQ ID NO: 46579 - protein, 10 aa, Artificial Sequence
  Description of Artificial Sequence: Synthetic epitope
SNQTEFKFDL

SEQ ID NO: 46580 - protein, 10 aa, Artificial Sequence
  Description of Artificial Sequence: Synthetic epitope
SNRAASYKGK

SEQ ID NO: 46581 - protein, 10 aa, Artificial Sequence
  Description of Artificial Sequence: Synthetic epitope
SNREEMKFHE

SEQ ID NO: 46582 - protein, 10 aa, Artificial Sequence
  Description of Artificial Sequence: Synthetic epitope
SNRLVSLDSG

SEQ ID NO: 46583 - protein, 10 aa, Artificial Sequence
  Description of Artificial Sequence: Synthetic epitope
SNRMRSYKQE

SEQ ID NO: 46584 - protein, 10 aa, Artificial Sequence
  Description of Artificial Sequence: Synthetic epitope
SNRSEIGHSP

SEQ ID NO: 46585 - protein, 10 aa, Artificial Sequence
  Description of Artificial Sequence: Synthetic epitope
SNRSETSTSD

SEQ ID NO: 46586 - protein, 10 aa, Artificial Sequence
  Description of Artificial Sequence: Synthetic epitope
SNRTLAMNAT

SEQ ID NO: 46587 - protein, 10 aa, Artificial Sequence
  Description of Artificial Sequence: Synthetic epitope
SNRVDAKTKL

SEQ ID NO: 46588 - protein, 10 aa, Artificial Sequence
  Description of Artificial Sequence: Synthetic epitope
SNSAMPKFSA

SEQ ID NO: 46589 - protein, 10 aa, Artificial Sequence
  Description of Artificial Sequence: Synthetic epitope
SNSAQLLVEA

SEQ ID NO: 46590 - protein, 10 aa, Artificial Sequence
  Description of Artificial Sequence: Synthetic epitope
SNSASSFVVF

SEQ ID NO: 46591 - protein, 10 aa, Artificial Sequence
  Description of Artificial Sequence: Synthetic epitope
SNSDQLEDQA

SEQ ID NO: 46592 - protein, 10 aa, Artificial Sequence
  Description of Artificial Sequence: Synthetic epitope
SNSEASVDSA

SEQ ID NO: 46593 - protein, 10 aa, Artificial Sequence
  Description of Artificial Sequence: Synthetic epitope
SNSKIKTSDT

SEQ ID NO: 46594 - protein, 10 aa, Artificial Sequence
  Description of Artificial Sequence: Synthetic epitope
SNSKLLDSSE

SEQ ID NO: 46595 - protein, 10 aa, Artificial Sequence
  Description of Artificial Sequence: Synthetic epitope
SNSLKKSSAE

SEQ ID NO: 46596 - protein, 10 aa, Artificial Sequence
  Description of Artificial Sequence: Synthetic epitope
SNSMQGRRAK

SEQ ID NO: 46597 - protein, 10 aa, Artificial Sequence
  Description of Artificial Sequence: Synthetic epitope
SNSMTPSQKV

SEQ ID NO: 46598 - protein, 10 aa, Artificial Sequence
  Description of Artificial Sequence: Synthetic epitope
SNSNSMIDAF

SEQ ID NO: 46599 - protein, 10 aa, Artificial Sequence
  Description of Artificial Sequence: Synthetic epitope
SNSQIETEIE

SEQ ID NO: 46600 - protein, 10 aa, Artificial Sequence
  Description of Artificial Sequence: Synthetic epitope
SNSQPSQMHL

SEQ ID NO: 46601 - protein, 10 aa, Artificial Sequence
  Description of Artificial Sequence: Synthetic epitope
SNSQRLADQY

SEQ ID NO: 46602 - protein, 10 aa, Artificial Sequence
  Description of Artificial Sequence: Synthetic epitope
SNSQSGLQSQ

SEQ ID NO: 46603 - protein, 10 aa, Artificial Sequence
  Description of Artificial Sequence: Synthetic epitope
SNSQVSKLRE

SEQ ID NO: 46604 - protein, 10 aa, Artificial Sequence
  Description of Artificial Sequence: Synthetic epitope
SNSRQLKWLS

SEQ ID NO: 46605 - protein, 10 aa, Artificial Sequence
  Description of Artificial Sequence: Synthetic epitope
SNSRSGSRER

SEQ ID NO: 46606 - protein, 10 aa, Artificial Sequence
  Description of Artificial Sequence: Synthetic epitope
SNSRSPAEAS

SEQ ID NO: 46607 - protein, 10 aa, Artificial Sequence
  Description of Artificial Sequence: Synthetic epitope
SNSRVSEPHR

SEQ ID NO: 46608 - protein, 10 aa, Artificial Sequence
  Description of Artificial Sequence: Synthetic epitope
SNSSAANLMA

SEQ ID NO: 46609 - protein, 10 aa, Artificial Sequence
  Description of Artificial Sequence: Synthetic epitope
SNSSADVLSP

SEQ ID NO: 46610 - protein, 10 aa, Artificial Sequence
  Description of Artificial Sequence: Synthetic epitope
SNSSEEAESE

SEQ ID NO: 46611 - protein, 10 aa, Artificial Sequence
  Description of Artificial Sequence: Synthetic epitope
SNSSETGTAS

SEQ ID NO: 46612 - protein, 10 aa, Artificial Sequence
  Description of Artificial Sequence: Synthetic epitope
SNSSKAGVSQ

SEQ ID NO: 46613 - protein, 10 aa, Artificial Sequence
  Description of Artificial Sequence: Synthetic epitope
SNSSLFKSWR

SEQ ID NO: 46614 - protein, 10 aa, Artificial Sequence
  Description of Artificial Sequence: Synthetic epitope
SNSSLKNPQA

SEQ ID NO: 46615 - protein, 10 aa, Artificial Sequence
  Description of Artificial Sequence: Synthetic epitope
SNSSQKREQP

SEQ ID NO: 46616 - protein, 10 aa, Artificial Sequence
  Description of Artificial Sequence: Synthetic epitope
SNSSTATGTT

SEQ ID NO: 46617 - protein, 10 aa, Artificial Sequence
  Description of Artificial Sequence: Synthetic epitope
SNSSTKTEPS

SEQ ID NO: 46618 - protein, 10 aa, Artificial Sequence
  Description of Artificial Sequence: Synthetic epitope
SNSSTSAPPT

SEQ ID NO: 46619 - protein, 10 aa, Artificial Sequence
  Description of Artificial Sequence: Synthetic epitope
SNSSVVNFQE

SEQ ID NO: 46620 - protein, 10 aa, Artificial Sequence
  Description of Artificial Sequence: Synthetic epitope
SNSTEAGQKL

SEQ ID NO: 46621 - protein, 10 aa, Artificial Sequence
  Description of Artificial Sequence: Synthetic epitope
SNSTIGYQQS

SEQ ID NO: 46622 - protein, 10 aa, Artificial Sequence
  Description of Artificial Sequence: Synthetic epitope
SNSTRASPES

SEQ ID NO: 46623 - protein, 10 aa, Artificial Sequence
  Description of Artificial Sequence: Synthetic epitope
SNSTSSKLTH

SEQ ID NO: 46624 - protein, 10 aa, Artificial Sequence
  Description of Artificial Sequence: Synthetic epitope
SNSTTQVSQP

SEQ ID NO: 46625 - protein, 10 aa, Artificial Sequence
  Description of Artificial Sequence: Synthetic epitope
SNSVKFGVEM

SEQ ID NO: 46626 - protein, 10 aa, Artificial Sequence
  Description of Artificial Sequence: Synthetic epitope
SNSVSSKNGT

SEQ ID NO: 46627 - protein, 10 aa, Artificial Sequence
  Description of Artificial Sequence: Synthetic epitope
SNSVYKGASP

SEQ ID NO: 46628 - protein, 10 aa, Artificial Sequence
  Description of Artificial Sequence: Synthetic epitope
SNTDKQTLTT

SEQ ID NO: 46629 - protein, 10 aa, Artificial Sequence
  Description of Artificial Sequence: Synthetic epitope
SNTEASSKQE

SEQ ID NO: 46630 - protein, 10 aa, Artificial Sequence
  Description of Artificial Sequence: Synthetic epitope
SNTEKKLRLQ

SEQ ID NO: 46631 - protein, 10 aa, Artificial Sequence
  Description of Artificial Sequence: Synthetic epitope
SNTGQKTQPD

SEQ ID NO: 46632 - protein, 10 aa, Artificial Sequence
  Description of Artificial Sequence: Synthetic epitope
SNTIKKDHTG

SEQ ID NO: 46633 - protein, 10 aa, Artificial Sequence
  Description of Artificial Sequence: Synthetic epitope
SNTILSADRP

SEQ ID NO: 46634 - protein, 10 aa, Artificial Sequence
  Description of Artificial Sequence: Synthetic epitope
SNTIRRPRNY

SEQ ID NO: 46635 - protein, 10 aa, Artificial Sequence
  Description of Artificial Sequence: Synthetic epitope
SNTKIMDHQR

SEQ ID NO: 46636 - protein, 10 aa, Artificial Sequence
  Description of Artificial Sequence: Synthetic epitope
SNTKKASGKT

SEQ ID NO: 46637 - protein, 10 aa, Artificial Sequence
  Description of Artificial Sequence: Synthetic epitope
SNTKPTVNEH

SEQ ID NO: 46638 - protein, 10 aa, Artificial Sequence
  Description of Artificial Sequence: Synthetic epitope
SNTKQARATA

SEQ ID NO: 46639 - protein, 10 aa, Artificial Sequence
  Description of Artificial Sequence: Synthetic epitope
SNTLEIMKTP

SEQ ID NO: 46640 - protein, 10 aa, Artificial Sequence
  Description of Artificial Sequence: Synthetic epitope
SNTREQSSEA

SEQ ID NO: 46641 - protein, 10 aa, Artificial Sequence
  Description of Artificial Sequence: Synthetic epitope
SNTSASNADK

SEQ ID NO: 46642 - protein, 10 aa, Artificial Sequence
  Description of Artificial Sequence: Synthetic epitope
SNTSSGEGSQ

SEQ ID NO: 46643 - protein, 10 aa, Artificial Sequence
  Description of Artificial Sequence: Synthetic epitope
SNTSSIVESN

SEQ ID NO: 46644 - protein, 10 aa, Artificial Sequence
  Description of Artificial Sequence: Synthetic epitope
SNTSSNSDDK

SEQ ID NO: 46645 - protein, 10 aa, Artificial Sequence
  Description of Artificial Sequence: Synthetic epitope
SNTVIKLINE

SEQ ID NO: 46646 - protein, 10 aa, Artificial Sequence
  Description of Artificial Sequence: Synthetic epitope
SNTVSKLLEK

SEQ ID NO: 46647 - protein, 10 aa, Artificial Sequence
  Description of Artificial Sequence: Synthetic epitope
SNTVSKLLEK

SEQ ID NO: 46648 - protein, 10 aa, Artificial Sequence
  Description of Artificial Sequence: Synthetic epitope
SNVALDSMHW

SEQ ID NO: 46649 - protein, 10 aa, Artificial Sequence
  Description of Artificial Sequence: Synthetic epitope
SNVEAAKRLA

SEQ ID NO: 46650 - protein, 10 aa, Artificial Sequence
  Description of Artificial Sequence: Synthetic epitope
SNVEFLLARA

SEQ ID NO: 46651 - protein, 10 aa, Artificial Sequence
  Description of Artificial Sequence: Synthetic epitope
SNVGRLSLVF

SEQ ID NO: 46652 - protein, 10 aa, Artificial Sequence
  Description of Artificial Sequence: Synthetic epitope
SNVIEKAETS

SEQ ID NO: 46653 - protein, 10 aa, Artificial Sequence
  Description of Artificial Sequence: Synthetic epitope
SNVKIVKVKK

SEQ ID NO: 46654 - protein, 10 aa, Artificial Sequence
  Description of Artificial Sequence: Synthetic epitope
SNVLARIDAA

SEQ ID NO: 46655 - protein, 10 aa, Artificial Sequence
  Description of Artificial Sequence: Synthetic epitope
SNVLHEKSKG

SEQ ID NO: 46656 - protein, 10 aa, Artificial Sequence
  Description of Artificial Sequence: Synthetic epitope
SNVLVKFTLS

SEQ ID NO: 46657 - protein, 10 aa, Artificial Sequence
  Description of Artificial Sequence: Synthetic epitope
SNVMHIESKQ

SEQ ID NO: 46658 - protein, 10 aa, Artificial Sequence
  Description of Artificial Sequence: Synthetic epitope
SNVNTPVKEQ

SEQ ID NO: 46659 - protein, 10 aa, Artificial Sequence
  Description of Artificial Sequence: Synthetic epitope
SNVRAVTVEM

SEQ ID NO: 46660 - protein, 10 aa, Artificial Sequence
  Description of Artificial Sequence: Synthetic epitope
SNVTLFDLAD

SEQ ID NO: 46661 - protein, 10 aa, Artificial Sequence
  Description of Artificial Sequence: Synthetic epitope
SNVVSEVENQ

SEQ ID NO: 46662 - protein, 10 aa, Artificial Sequence
  Description of Artificial Sequence: Synthetic epitope
SNWDQNVQSM

SEQ ID NO: 46663 - protein, 10 aa, Artificial Sequence
  Description of Artificial Sequence: Synthetic epitope
SNWIAANTKE

SEQ ID NO: 46664 - protein, 10 aa, Artificial Sequence
  Description of Artificial Sequence: Synthetic epitope
SNWREERYQD

SEQ ID NO: 46665 - protein, 10 aa, Artificial Sequence
  Description of Artificial Sequence: Synthetic epitope
SNYAGAETGD

SEQ ID NO: 46666 - protein, 10 aa, Artificial Sequence
  Description of Artificial Sequence: Synthetic epitope
SNYNVTSDYA

SEQ ID NO: 46667 - protein, 10 aa, Artificial Sequence
  Description of Artificial Sequence: Synthetic epitope
SNYQDEQGED

SEQ ID NO: 46668 - protein, 10 aa, Artificial Sequence
  Description of Artificial Sequence: Synthetic epitope
SNYQSIIELK

SEQ ID NO: 46669 - protein, 10 aa, Artificial Sequence
  Description of Artificial Sequence: Synthetic epitope
SNYRNKLTDE

SEQ ID NO: 46670 - protein, 10 aa, Artificial Sequence
  Description of Artificial Sequence: Synthetic epitope
SNYTDLAMST

SEQ ID NO: 46671 - protein, 10 aa, Artificial Sequence
  Description of Artificial Sequence: Synthetic epitope
SPAELMMLTI

SEQ ID NO: 46672 - protein, 10 aa, Artificial Sequence
  Description of Artificial Sequence: Synthetic epitope
SPAGASAAVE

SEQ ID NO: 46673 - protein, 10 aa, Artificial Sequence
  Description of Artificial Sequence: Synthetic epitope
SPAIPLETSA

SEQ ID NO: 46674 - protein, 10 aa, Artificial Sequence
  Description of Artificial Sequence: Synthetic epitope
SPAISKYDRE

SEQ ID NO: 46675 - protein, 10 aa, Artificial Sequence
  Description of Artificial Sequence: Synthetic epitope
SPAKSSQDHA

SEQ ID NO: 46676 - protein, 10 aa, Artificial Sequence
  Description of Artificial Sequence: Synthetic epitope
SPAKTSSMEK

SEQ ID NO: 46677 - protein, 10 aa, Artificial Sequence
  Description of Artificial Sequence: Synthetic epitope
SPAKVTAGQP

SEQ ID NO: 46678 - protein, 10 aa, Artificial Sequence
  Description of Artificial Sequence: Synthetic epitope
SPALKTTRLQ

SEQ ID NO: 46679 - protein, 10 aa, Artificial Sequence
  Description of Artificial Sequence: Synthetic epitope
SPALSFTYSS

SEQ ID NO: 46680 - protein, 10 aa, Artificial Sequence
  Description of Artificial Sequence: Synthetic epitope
SPAQALETKV

SEQ ID NO: 46681 - protein, 10 aa, Artificial Sequence
  Description of Artificial Sequence: Synthetic epitope
SPAQLLAQKG

SEQ ID NO: 46682 - protein, 10 aa, Artificial Sequence
  Description of Artificial Sequence: Synthetic epitope
SPARGRIQFS

SEQ ID NO: 46683 - protein, 10 aa, Artificial Sequence
  Description of Artificial Sequence: Synthetic epitope
SPARHQLTSA

SEQ ID NO: 46684 - protein, 10 aa, Artificial Sequence
  Description of Artificial Sequence: Synthetic epitope
SPASAIQTSA

SEQ ID NO: 46685 - protein, 10 aa, Artificial Sequence
  Description of Artificial Sequence: Synthetic epitope
SPASLQLAQL

SEQ ID NO: 46686 - protein, 10 aa, Artificial Sequence
  Description of Artificial Sequence: Synthetic epitope
SPASSQSTPV

SEQ ID NO: 46687 - protein, 10 aa, Artificial Sequence
  Description of Artificial Sequence: Synthetic epitope
SPASTRSASV

SEQ ID NO: 46688 - protein, 10 aa, Artificial Sequence
  Description of Artificial Sequence: Synthetic epitope
SPATLQVTTM

SEQ ID NO: 46689 - protein, 10 aa, Artificial Sequence
  Description of Artificial Sequence: Synthetic epitope
SPATNSSHTD

SEQ ID NO: 46690 - protein, 10 aa, Artificial Sequence
  Description of Artificial Sequence: Synthetic epitope
SPAVAQSNSS

SEQ ID NO: 46691 - protein, 10 aa, Artificial Sequence
  Description of Artificial Sequence: Synthetic epitope
SPAVGKAKSS

SEQ ID NO: 46692 - protein, 10 aa, Artificial Sequence
  Description of Artificial Sequence: Synthetic epitope
SPAVSAVSQL

SEQ ID NO: 46693 - protein, 10 aa, Artificial Sequence
  Description of Artificial Sequence: Synthetic epitope
SPAVSVKSPV

SEQ ID NO: 46694 - protein, 10 aa, Artificial Sequence
  Description of Artificial Sequence: Synthetic epitope
SPDEMVPPSM

SEQ ID NO: 46695 - protein, 10 aa, Artificial Sequence
  Description of Artificial Sequence: Synthetic epitope
SPDSDAQPDA

SEQ ID NO: 46696 - protein, 10 aa, Artificial Sequence
  Description of Artificial Sequence: Synthetic epitope
SPDVSSEMVL

SEQ ID NO: 46697 - protein, 10 aa, Artificial Sequence
  Description of Artificial Sequence: Synthetic epitope
SPEAFSHSYP

SEQ ID NO: 46698 - protein, 10 aa, Artificial Sequence
  Description of Artificial Sequence: Synthetic epitope
SPEISEASLM

SEQ ID NO: 46699 - protein, 10 aa, Artificial Sequence
  Description of Artificial Sequence: Synthetic epitope
SPEKIVLGQP

SEQ ID NO: 46700 - protein, 10 aa, Artificial Sequence
  Description of Artificial Sequence: Synthetic epitope
SPEKKATEDE

SEQ ID NO: 46701 - protein, 10 aa, Artificial Sequence
  Description of Artificial Sequence: Synthetic epitope
SPEKNTASQN

SEQ ID NO: 46702 - protein, 10 aa, Artificial Sequence
  Description of Artificial Sequence: Synthetic epitope
SPEKVAMLDG

SEQ ID NO: 46703 - protein, 10 aa, Artificial Sequence
  Description of Artificial Sequence: Synthetic epitope
SPEQTAQLEE

SEQ ID NO: 46704 - protein, 10 aa, Artificial Sequence
  Description of Artificial Sequence: Synthetic epitope
SPERSESSEL

SEQ ID NO: 46705 - protein, 10 aa, Artificial Sequence
  Description of Artificial Sequence: Synthetic epitope
SPESQAVEEN

SEQ ID NO: 46706 - protein, 10 aa, Artificial Sequence
  Description of Artificial Sequence: Synthetic epitope
SPETTEISAV

SEQ ID NO: 46707 - protein, 10 aa, Artificial Sequence
  Description of Artificial Sequence: Synthetic epitope
SPEVATADKA

SEQ ID NO: 46708 - protein, 10 aa, Artificial Sequence
  Description of Artificial Sequence: Synthetic epitope
SPEVSASRRK

SEQ ID NO: 46709 - protein, 10 aa, Artificial Sequence
  Description of Artificial Sequence: Synthetic epitope
SPFAESSQLK

SEQ ID NO: 46710 - protein, 10 aa, Artificial Sequence
  Description of Artificial Sequence: Synthetic epitope
SPFKTSSILV

SEQ ID NO: 46711 - protein, 10 aa, Artificial Sequence
  Description of Artificial Sequence: Synthetic epitope
SPFSILSLLS

SEQ ID NO: 46712 - protein, 10 aa, Artificial Sequence
  Description of Artificial Sequence: Synthetic epitope
SPFTVGSLIK

SEQ ID NO: 46713 - protein, 10 aa, Artificial Sequence
  Description of Artificial Sequence: Synthetic epitope
SPGDNQAQSE

SEQ ID NO: 46714 - protein, 10 aa, Artificial Sequence
  Description of Artificial Sequence: Synthetic epitope
SPGHMEERKV

SEQ ID NO: 46715 - protein, 10 aa, Artificial Sequence
  Description of Artificial Sequence: Synthetic epitope
SPGNASELGE

SEQ ID NO: 46716 - protein, 10 aa, Artificial Sequence
  Description of Artificial Sequence: Synthetic epitope
SPHEDEAMVL

SEQ ID NO: 46717 - protein, 10 aa, Artificial Sequence
  Description of Artificial Sequence: Synthetic epitope
SPHPTYLHQA

SEQ ID NO: 46718 - protein, 10 aa, Artificial Sequence
  Description of Artificial Sequence: Synthetic epitope
SPHQIGIKQI

SEQ ID NO: 46719 - protein, 10 aa, Artificial Sequence
  Description of Artificial Sequence: Synthetic epitope
SPHQNLSRPL

SEQ ID NO: 46720 - protein, 10 aa, Artificial Sequence
  Description of Artificial Sequence: Synthetic epitope
SPHSTEAEIS

SEQ ID NO: 46721 - protein, 10 aa, Artificial Sequence
  Description of Artificial Sequence: Synthetic epitope
SPIDAKQQLQ

SEQ ID NO: 46722 - protein, 10 aa, Artificial Sequence
  Description of Artificial Sequence: Synthetic epitope
SPIEFQIGET

SEQ ID NO: 46723 - protein, 10 aa, Artificial Sequence
  Description of Artificial Sequence: Synthetic epitope
SPILAPVRSR

SEQ ID NO: 46724 - protein, 10 aa, Artificial Sequence
  Description of Artificial Sequence: Synthetic epitope
SPINLRKKSL

SEQ ID NO: 46725 - protein, 10 aa, Artificial Sequence
  Description of Artificial Sequence: Synthetic epitope
SPIQETLESM

SEQ ID NO: 46726 - protein, 10 aa, Artificial Sequence
  Description of Artificial Sequence: Synthetic epitope
SPISRTDEIR

SEQ ID NO: 46727 - protein, 10 aa, Artificial Sequence
  Description of Artificial Sequence: Synthetic epitope
SPKDAVAITK

SEQ ID NO: 46728 - protein, 10 aa, Artificial Sequence
  Description of Artificial Sequence: Synthetic epitope
SPKEEAAPQE

SEQ ID NO: 46729 - protein, 10 aa, Artificial Sequence
  Description of Artificial Sequence: Synthetic epitope
SPKGSSETET

SEQ ID NO: 46730 - protein, 10 aa, Artificial Sequence
  Description of Artificial Sequence: Synthetic epitope
SPKKEAAENR

SEQ ID NO: 46731 - protein, 10 aa, Artificial Sequence
  Description of Artificial Sequence: Synthetic epitope
SPKKVKWSST

SEQ ID NO: 46732 - protein, 10 aa, Artificial Sequence
  Description of Artificial Sequence: Synthetic epitope
SPKKVSALKR

SEQ ID NO: 46733 - protein, 10 aa, Artificial Sequence
  Description of Artificial Sequence: Synthetic epitope
SPKMSNIMQS

SEQ ID NO: 46734 - protein, 10 aa, Artificial Sequence
  Description of Artificial Sequence: Synthetic epitope
SPKNDQMIEK

SEQ ID NO: 46735 - protein, 10 aa, Artificial Sequence
  Description of Artificial Sequence: Synthetic epitope
SPKRFRAKSS

SEQ ID NO: 46736 - protein, 10 aa, Artificial Sequence
  Description of Artificial Sequence: Synthetic epitope
SPKSAGASGS

SEQ ID NO: 46737 - protein, 10 aa, Artificial Sequence
  Description of Artificial Sequence: Synthetic epitope
SPKTAQSPAM

SEQ ID NO: 46738 - protein, 10 aa, Artificial Sequence
  Description of Artificial Sequence: Synthetic epitope
SPKWTSKVVT

SEQ ID NO: 46739 - protein, 10 aa, Artificial Sequence
  Description of Artificial Sequence: Synthetic epitope
SPLASRQNTL

SEQ ID NO: 46740 - protein, 10 aa, Artificial Sequence
  Description of Artificial Sequence: Synthetic epitope
SPLATSALNP

SEQ ID NO: 46741 - protein, 10 aa, Artificial Sequence
  Description of Artificial Sequence: Synthetic epitope
SPLEEATLSE

SEQ ID NO: 46742 - protein, 10 aa, Artificial Sequence
  Description of Artificial Sequence: Synthetic epitope
SPLGMAAREE

SEQ ID NO: 46743 - protein, 10 aa, Artificial Sequence
  Description of Artificial Sequence: Synthetic epitope
SPLLNSPTVA

SEQ ID NO: 46744 - protein, 10 aa, Artificial Sequence
  Description of Artificial Sequence: Synthetic epitope
SPLQTIGEEQ

SEQ ID NO: 46745 - protein, 10 aa, Artificial Sequence
  Description of Artificial Sequence: Synthetic epitope
SPLRGGAQTE

SEQ ID NO: 46746 - protein, 10 aa, Artificial Sequence
  Description of Artificial Sequence: Synthetic epitope
SPLSMQSPSL

SEQ ID NO: 46747 - protein, 10 aa, Artificial Sequence
  Description of Artificial Sequence: Synthetic epitope
SPLSQLQRME

SEQ ID NO: 46748 - protein, 10 aa, Artificial Sequence
  Description of Artificial Sequence: Synthetic epitope
SPLSTTAREP

SEQ ID NO: 46749 - protein, 10 aa, Artificial Sequence
  Description of Artificial Sequence: Synthetic epitope
SPLVSQNNEQ

SEQ ID NO: 46750 - protein, 10 aa, Artificial Sequence
  Description of Artificial Sequence: Synthetic epitope
SPMKEKGNIQ

SEQ ID NO: 46751 - protein, 10 aa, Artificial Sequence
  Description of Artificial Sequence: Synthetic epitope
SPMLQIQRDA

SEQ ID NO: 46752 - protein, 10 aa, Artificial Sequence
  Description of Artificial Sequence: Synthetic epitope
SPMSISKSAD

SEQ ID NO: 46753 - protein, 10 aa, Artificial Sequence
  Description of Artificial Sequence: Synthetic epitope
SPNQSQSAQQ

SEQ ID NO: 46754 - protein, 10 aa, Artificial Sequence
  Description of Artificial Sequence: Synthetic epitope
SPNRAARDNP

SEQ ID NO: 46755 - protein, 10 aa, Artificial Sequence
  Description of Artificial Sequence: Synthetic epitope
SPNSVVKEKQ

SEQ ID NO: 46756 - protein, 10 aa, Artificial Sequence
  Description of Artificial Sequence: Synthetic epitope
SPPEPTVMTH

SEQ ID NO: 46757 - protein, 10 aa, Artificial Sequence
  Description of Artificial Sequence: Synthetic epitope
SPPKSADASP

SEQ ID NO: 46758 - protein, 10 aa, Artificial Sequence
  Description of Artificial Sequence: Synthetic epitope
SPPKSFRMSA

SEQ ID NO: 46759 - protein, 10 aa, Artificial Sequence
  Description of Artificial Sequence: Synthetic epitope
SPPSKKSPPA

SEQ ID NO: 46760 - protein, 10 aa, Artificial Sequence
  Description of Artificial Sequence: Synthetic epitope
SPPSRDSPEP

SEQ ID NO: 46761 - protein, 10 aa, Artificial Sequence
  Description of Artificial Sequence: Synthetic epitope
SPPYDTENPY

SEQ ID NO: 46762 - protein, 10 aa, Artificial Sequence
  Description of Artificial Sequence: Synthetic epitope
SPQAAQEKDG

SEQ ID NO: 46763 - protein, 10 aa, Artificial Sequence
  Description of Artificial Sequence: Synthetic epitope
SPQAFAYQLS

SEQ ID NO: 46764 - protein, 10 aa, Artificial Sequence
  Description of Artificial Sequence: Synthetic epitope
SPQGQLDTSE

SEQ ID NO: 46765 - protein, 10 aa, Artificial Sequence
  Description of Artificial Sequence: Synthetic epitope
SPREDEESSI

SEQ ID NO: 46766 - protein, 10 aa, Artificial Sequence
  Description of Artificial Sequence: Synthetic epitope
SPRELTALRE

SEQ ID NO: 46767 - protein, 10 aa, Artificial Sequence
  Description of Artificial Sequence: Synthetic epitope
SPREVKEMEQ

SEQ ID NO: 46768 - protein, 10 aa, Artificial Sequence
  Description of Artificial Sequence: Synthetic epitope
SPRKESGRSQ

SEQ ID NO: 46769 - protein, 10 aa, Artificial Sequence
  Description of Artificial Sequence: Synthetic epitope
SPRNQTQLLD

SEQ ID NO: 46770 - protein, 10 aa, Artificial Sequence
  Description of Artificial Sequence: Synthetic epitope
SPRRTSRVSG

SEQ ID NO: 46771 - protein, 10 aa, Artificial Sequence
  Description of Artificial Sequence: Synthetic epitope
SPRSAMSTAT

SEQ ID NO: 46772 - protein, 10 aa, Artificial Sequence
  Description of Artificial Sequence: Synthetic epitope
SPRSAVKLTK

SEQ ID NO: 46773 - protein, 10 aa, Artificial Sequence
  Description of Artificial Sequence: Synthetic epitope
SPRSEETTAS

SEQ ID NO: 46774 - protein, 10 aa, Artificial Sequence
  Description of Artificial Sequence: Synthetic epitope
SPRSMASGSG

SEQ ID NO: 46775 - protein, 10 aa, Artificial Sequence
  Description of Artificial Sequence: Synthetic epitope
SPRSQEKEVQ

SEQ ID NO: 46776 - protein, 10 aa, Artificial Sequence
  Description of Artificial Sequence: Synthetic epitope
SPSAASQLIL

SEQ ID NO: 46777 - protein, 10 aa, Artificial Sequence
  Description of Artificial Sequence: Synthetic epitope
SPSAEAVSSR

SEQ ID NO: 46778 - protein, 10 aa, Artificial Sequence
  Description of Artificial Sequence: Synthetic epitope
SPSAESVSDR

SEQ ID NO: 46779 - protein, 10 aa, Artificial Sequence
  Description of Artificial Sequence: Synthetic epitope
SPSAMTDAAN

SEQ ID NO: 46780 - protein, 10 aa, Artificial Sequence
  Description of Artificial Sequence: Synthetic epitope
SPSATVKTRS

SEQ ID NO: 46781 - protein, 10 aa, Artificial Sequence
  Description of Artificial Sequence: Synthetic epitope
SPSAVSASYE

SEQ ID NO: 46782 - protein, 10 aa, Artificial Sequence
  Description of Artificial Sequence: Synthetic epitope
SPSAVSSANG

SEQ ID NO: 46783 - protein, 10 aa, Artificial Sequence
  Description of Artificial Sequence: Synthetic epitope
SPSDKTKNDD

SEQ ID NO: 46784 - protein, 10 aa, Artificial Sequence
  Description of Artificial Sequence: Synthetic epitope
SPSEAQNLDE

SEQ ID NO: 46785 - protein, 10 aa, Artificial Sequence
  Description of Artificial Sequence: Synthetic epitope
SPSETLAYQH

SEQ ID NO: 46786 - protein, 10 aa, Artificial Sequence
  Description of Artificial Sequence: Synthetic epitope
SPSFTSSITT

SEQ ID NO: 46787 - protein, 10 aa, Artificial Sequence
  Description of Artificial Sequence: Synthetic epitope
SPSIMLSKKF

SEQ ID NO: 46788 - protein, 10 aa, Artificial Sequence
  Description of Artificial Sequence: Synthetic epitope
SPSKKLKKSQ

SEQ ID NO: 46789 - protein, 10 aa, Artificial Sequence
  Description of Artificial Sequence: Synthetic epitope
SPSKSVTKPV

SEQ ID NO: 46790 - protein, 10 aa, Artificial Sequence
  Description of Artificial Sequence: Synthetic epitope
SPSLESRSTA

SEQ ID NO: 46791 - protein, 10 aa, Artificial Sequence
  Description of Artificial Sequence: Synthetic epitope
SPSNTTSRLK

SEQ ID NO: 46792 - protein, 10 aa, Artificial Sequence
  Description of Artificial Sequence: Synthetic epitope
SPSPSRVTSR

SEQ ID NO: 46793 - protein, 10 aa, Artificial Sequence
  Description of Artificial Sequence: Synthetic epitope
SPSQYINEEN

SEQ ID NO: 46794 - protein, 10 aa, Artificial Sequence
  Description of Artificial Sequence: Synthetic epitope
SPSRFSGDSP

SEQ ID NO: 46795 - protein, 10 aa, Artificial Sequence
  Description of Artificial Sequence: Synthetic epitope
SPSRKTITIT

SEQ ID NO: 46796 - protein, 10 aa, Artificial Sequence
  Description of Artificial Sequence: Synthetic epitope
SPSRSLSVPN

SEQ ID NO: 46797 - protein, 10 aa, Artificial Sequence
  Description of Artificial Sequence: Synthetic epitope
SPSRTKIPAE

SEQ ID NO: 46798 - protein, 10 aa, Artificial Sequence
  Description of Artificial Sequence: Synthetic epitope
SPSSAKKPKA

SEQ ID NO: 46799 - protein, 10 aa, Artificial Sequence
  Description of Artificial Sequence: Synthetic epitope
SPSSVDYAAS

SEQ ID NO: 46800 - protein, 10 aa, Artificial Sequence
  Description of Artificial Sequence: Synthetic epitope
SPSTSSTAAL

SEQ ID NO: 46801 - protein, 10 aa, Artificial Sequence
  Description of Artificial Sequence: Synthetic epitope
SPSVADVKIY

SEQ ID NO: 46802 - protein, 10 aa, Artificial Sequence
  Description of Artificial Sequence: Synthetic epitope
SPSVISVSKG

SEQ ID NO: 46803 - protein, 10 aa, Artificial Sequence
  Description of Artificial Sequence: Synthetic epitope
SPSVKNSASR

SEQ ID NO: 46804 - protein, 10 aa, Artificial Sequence
  Description of Artificial Sequence: Synthetic epitope
SPSVQTQQHQ

SEQ ID NO: 46805 - protein, 10 aa, Artificial Sequence
  Description of Artificial Sequence: Synthetic epitope
SPTAAEAKEK

SEQ ID NO: 46806 - protein, 10 aa, Artificial Sequence
  Description of Artificial Sequence: Synthetic epitope
SPTAAKPSPF

SEQ ID NO: 46807 - protein, 10 aa, Artificial Sequence
  Description of Artificial Sequence: Synthetic epitope
SPTAATVQFK

SEQ ID NO: 46808 - protein, 10 aa, Artificial Sequence
  Description of Artificial Sequence: Synthetic epitope
SPTAMEIDKR

SEQ ID NO: 46809 - protein, 10 aa, Artificial Sequence
  Description of Artificial Sequence: Synthetic epitope
SPTASLLKQP

SEQ ID NO: 46810 - protein, 10 aa, Artificial Sequence
  Description of Artificial Sequence: Synthetic epitope
SPTGHVDNNQ

SEQ ID NO: 46811 - protein, 10 aa, Artificial Sequence
  Description of Artificial Sequence: Synthetic epitope
SPTIKARRSR

SEQ ID NO: 46812 - protein, 10 aa, Artificial Sequence
  Description of Artificial Sequence: Synthetic epitope
SPTISTSHSL

SEQ ID NO: 46813 - protein, 10 aa, Artificial Sequence
  Description of Artificial Sequence: Synthetic epitope
SPTLARTSTD

SEQ ID NO: 46814 - protein, 10 aa, Artificial Sequence
  Description of Artificial Sequence: Synthetic epitope
SPTQKSPVQP

SEQ ID NO: 46815 - protein, 10 aa, Artificial Sequence
  Description of Artificial Sequence: Synthetic epitope
SPTRARNMKD

SEQ ID NO: 46816 - protein, 10 aa, Artificial Sequence
  Description of Artificial Sequence: Synthetic epitope
SPTRTSSLSQ

SEQ ID NO: 46817 - protein, 10 aa, Artificial Sequence
  Description of Artificial Sequence: Synthetic epitope
SPTSDSHEKD

SEQ ID NO: 46818 - protein, 10 aa, Artificial Sequence
  Description of Artificial Sequence: Synthetic epitope
SPTSSATYQP

SEQ ID NO: 46819 - protein, 10 aa, Artificial Sequence
  Description of Artificial Sequence: Synthetic epitope
SPTTKLKVGK

SEQ ID NO: 46820 - protein, 10 aa, Artificial Sequence
  Description of Artificial Sequence: Synthetic epitope
SPTVSVNPLT

SEQ ID NO: 46821 - protein, 10 aa, Artificial Sequence
  Description of Artificial Sequence: Synthetic epitope
SPVENVTAAS

SEQ ID NO: 46822 - protein, 10 aa, Artificial Sequence
  Description of Artificial Sequence: Synthetic epitope
SPVEVAKAVY

SEQ ID NO: 46823 - protein, 10 aa, Artificial Sequence
  Description of Artificial Sequence: Synthetic epitope
SPVEVASLKE

SEQ ID NO: 46824 - protein, 10 aa, Artificial Sequence
  Description of Artificial Sequence: Synthetic epitope
SPVKISEIMR

SEQ ID NO: 46825 - protein, 10 aa, Artificial Sequence
  Description of Artificial Sequence: Synthetic epitope
SPVKIVSRPT

SEQ ID NO: 46826 - protein, 10 aa, Artificial Sequence
  Description of Artificial Sequence: Synthetic epitope
SPVLTKRLLG

SEQ ID NO: 46827 - protein, 10 aa, Artificial Sequence
  Description of Artificial Sequence: Synthetic epitope
SPVRVQSPSQ

SEQ ID NO: 46828 - protein, 10 aa, Artificial Sequence
  Description of Artificial Sequence: Synthetic epitope
SPVYQSSNDS

SEQ ID NO: 46829 - protein, 10 aa, Artificial Sequence
  Description of Artificial Sequence: Synthetic epitope
SPWKTQEHTP

SEQ ID NO: 46830 - protein, 10 aa, Artificial Sequence
  Description of Artificial Sequence: Synthetic epitope
SPYATLASAE

SEQ ID NO: 46831 - protein, 10 aa, Artificial Sequence
  Description of Artificial Sequence: Synthetic epitope
SPYATLASEF

SEQ ID NO: 46832 - protein, 10 aa, Artificial Sequence
  Description of Artificial Sequence: Synthetic epitope
SPYENKMGKT

SEQ ID NO: 46833 - protein, 10 aa, Artificial Sequence
  Description of Artificial Sequence: Synthetic epitope
SPYPIRSLIK

SEQ ID NO: 46834 - protein, 10 aa, Artificial Sequence
  Description of Artificial Sequence: Synthetic epitope
SPYTTSANRA

SEQ ID NO: 46835 - protein, 10 aa, Artificial Sequence
  Description of Artificial Sequence: Synthetic epitope
SPYVSADMHR

SEQ ID NO: 46836 - protein, 10 aa, Artificial Sequence
  Description of Artificial Sequence: Synthetic epitope
SQAADLANKG

SEQ ID NO: 46837 - protein, 10 aa, Artificial Sequence
  Description of Artificial Sequence: Synthetic epitope
SQAAGINLEI

SEQ ID NO: 46838 - protein, 10 aa, Artificial Sequence
  Description of Artificial Sequence: Synthetic epitope
SQAAQILSSD

SEQ ID NO: 46839 - protein, 10 aa, Artificial Sequence
  Description of Artificial Sequence: Synthetic epitope
SQADINKIVQ

SEQ ID NO: 46840 - protein, 10 aa, Artificial Sequence
  Description of Artificial Sequence: Synthetic epitope
SQAEALLMKA

SEQ ID NO: 46841 - protein, 10 aa, Artificial Sequence
  Description of Artificial Sequence: Synthetic epitope
SQAEAMKTSA

SEQ ID NO: 46842 - protein, 10 aa, Artificial Sequence
  Description of Artificial Sequence: Synthetic epitope
SQAEIINALL

SEQ ID NO: 46843 - protein, 10 aa, Artificial Sequence
  Description of Artificial Sequence: Synthetic epitope
SQAEKKSRAR

SEQ ID NO: 46844 - protein, 10 aa, Artificial Sequence
  Description of Artificial Sequence: Synthetic epitope
SQAENSLLQA

SEQ ID NO: 46845 - protein, 10 aa, Artificial Sequence
  Description of Artificial Sequence: Synthetic epitope
SQAETEGAKQ

SEQ ID NO: 46846 - protein, 10 aa, Artificial Sequence
  Description of Artificial Sequence: Synthetic epitope
SQAGGELKSS

SEQ ID NO: 46847 - protein, 10 aa, Artificial Sequence
  Description of Artificial Sequence: Synthetic epitope
SQAGSASLKD

SEQ ID NO: 46848 - protein, 10 aa, Artificial Sequence
  Description of Artificial Sequence: Synthetic epitope
SQAGVVTVSD

SEQ ID NO: 46849 - protein, 10 aa, Artificial Sequence
  Description of Artificial Sequence: Synthetic epitope
SQAKATTMES

SEQ ID NO: 46850 - protein, 10 aa, Artificial Sequence
  Description of Artificial Sequence: Synthetic epitope
SQAKDLAKGS

SEQ ID NO: 46851 - protein, 10 aa, Artificial Sequence
  Description of Artificial Sequence: Synthetic epitope
SQAKSEKTSL

SEQ ID NO: 46852 - protein, 10 aa, Artificial Sequence
  Description of Artificial Sequence: Synthetic epitope
SQAKTIATES

SEQ ID NO: 46853 - protein, 10 aa, Artificial Sequence
  Description of Artificial Sequence: Synthetic epitope
SQALDGRGSL

SEQ ID NO: 46854 - protein, 10 aa, Artificial Sequence
  Description of Artificial Sequence: Synthetic epitope
SQALKEKAEL

SEQ ID NO: 46855 - protein, 10 aa, Artificial Sequence
  Description of Artificial Sequence: Synthetic epitope
SQALKSSQGS

SEQ ID NO: 46856 - protein, 10 aa, Artificial Sequence
  Description of Artificial Sequence: Synthetic epitope
SQANQEQSDT

SEQ ID NO: 46857 - protein, 10 aa, Artificial Sequence
  Description of Artificial Sequence: Synthetic epitope
SQAQAKAESI

SEQ ID NO: 46858 - protein, 10 aa, Artificial Sequence
  Description of Artificial Sequence: Synthetic epitope
SQAQATVPPA

SEQ ID NO: 46859 - protein, 10 aa, Artificial Sequence
  Description of Artificial Sequence: Synthetic epitope
SQAQESNYEN

SEQ ID NO: 46860 - protein, 10 aa, Artificial Sequence
  Description of Artificial Sequence: Synthetic epitope
SQAQGEQSDA

SEQ ID NO: 46861 - protein, 10 aa, Artificial Sequence
  Description of Artificial Sequence: Synthetic epitope
SQAQSNLLGK

SEQ ID NO: 46862 - protein, 10 aa, Artificial Sequence
  Description of Artificial Sequence: Synthetic epitope
SQAQTEAFWE

SEQ ID NO: 46863 - protein, 10 aa, Artificial Sequence
  Description of Artificial Sequence: Synthetic epitope
SQAQTSSLPP

SEQ ID NO: 46864 - protein, 10 aa, Artificial Sequence
  Description of Artificial Sequence: Synthetic epitope
SQAQVVLQGK

SEQ ID NO: 46865 - protein, 10 aa, Artificial Sequence
  Description of Artificial Sequence: Synthetic epitope
SQAQWVSFTR

SEQ ID NO: 46866 - protein, 10 aa, Artificial Sequence
  Description of Artificial Sequence: Synthetic epitope
SQAREHQLAS

SEQ ID NO: 46867 - protein, 10 aa, Artificial Sequence
  Description of Artificial Sequence: Synthetic epitope
SQARESEEAQ

SEQ ID NO: 46868 - protein, 10 aa, Artificial Sequence
  Description of Artificial Sequence: Synthetic epitope
SQAREVPTEE

SEQ ID NO: 46869 - protein, 10 aa, Artificial Sequence
  Description of Artificial Sequence: Synthetic epitope
SQASADLEAT

SEQ ID NO: 46870 - protein, 10 aa, Artificial Sequence
  Description of Artificial Sequence: Synthetic epitope
SQASRPEQSV

SEQ ID NO: 46871 - protein, 10 aa, Artificial Sequence
  Description of Artificial Sequence: Synthetic epitope
SQASRRTIQL

SEQ ID NO: 46872 - protein, 10 aa, Artificial Sequence
  Description of Artificial Sequence: Synthetic epitope
SQASSVKQSR

SEQ ID NO: 46873 - protein, 10 aa, Artificial Sequence
  Description of Artificial Sequence: Synthetic epitope
SQASTEASSD

SEQ ID NO: 46874 - protein, 10 aa, Artificial Sequence
  Description of Artificial Sequence: Synthetic epitope
SQASTSIGVG

SEQ ID NO: 46875 - protein, 10 aa, Artificial Sequence
  Description of Artificial Sequence: Synthetic epitope
SQASTSTKSP

SEQ ID NO: 46876 - protein, 10 aa, Artificial Sequence
  Description of Artificial Sequence: Synthetic epitope
SQASWTKSQN

SEQ ID NO: 46877 - protein, 10 aa, Artificial Sequence
  Description of Artificial Sequence: Synthetic epitope
SQATDHTFLQ

SEQ ID NO: 46878 - protein, 10 aa, Artificial Sequence
  Description of Artificial Sequence: Synthetic epitope
SQATIILPLT

SEQ ID NO: 46879 - protein, 10 aa, Artificial Sequence
  Description of Artificial Sequence: Synthetic epitope
SQATNGVAEQ

SEQ ID NO: 46880 - protein, 10 aa, Artificial Sequence
  Description of Artificial Sequence: Synthetic epitope
SQATPNQQTY

SEQ ID NO: 46881 - protein, 10 aa, Artificial Sequence
  Description of Artificial Sequence: Synthetic epitope
SQATRAAKAK

SEQ ID NO: 46882 - protein, 10 aa, Artificial Sequence
  Description of Artificial Sequence: Synthetic epitope
SQATTLQEQT

SEQ ID NO: 46883 - protein, 10 aa, Artificial Sequence
  Description of Artificial Sequence: Synthetic epitope
SQAVGKMQST

SEQ ID NO: 46884 - protein, 10 aa, Artificial Sequence
  Description of Artificial Sequence: Synthetic epitope
SQAVSNARKL

SEQ ID NO: 46885 - protein, 10 aa, Artificial Sequence
  Description of Artificial Sequence: Synthetic epitope
SQAVTLIQEK

SEQ ID NO: 46886 - protein, 10 aa, Artificial Sequence
  Description of Artificial Sequence: Synthetic epitope
SQAYAISAGV

SEQ ID NO: 46887 - protein, 10 aa, Artificial Sequence
  Description of Artificial Sequence: Synthetic epitope
SQDANEQGQD

SEQ ID NO: 46888 - protein, 10 aa, Artificial Sequence
  Description of Artificial Sequence: Synthetic epitope
SQDDVAGVEE

SEQ ID NO: 46889 - protein, 10 aa, Artificial Sequence
  Description of Artificial Sequence: Synthetic epitope
SQDMLTSLTK

SEQ ID NO: 46890 - protein, 10 aa, Artificial Sequence
  Description of Artificial Sequence: Synthetic epitope
SQDPSLNYEY

SEQ ID NO: 46891 - protein, 10 aa, Artificial Sequence
  Description of Artificial Sequence: Synthetic epitope
SQDQEEKQLK

SEQ ID NO: 46892 - protein, 10 aa, Artificial Sequence
  Description of Artificial Sequence: Synthetic epitope
SQDQSKVSAP

SEQ ID NO: 46893 - protein, 10 aa, Artificial Sequence
  Description of Artificial Sequence: Synthetic epitope
SQDQTAVRLA

SEQ ID NO: 46894 - protein, 10 aa, Artificial Sequence
  Description of Artificial Sequence: Synthetic epitope
SQDSKLATTS

SEQ ID NO: 46895 - protein, 10 aa, Artificial Sequence
  Description of Artificial Sequence: Synthetic epitope
SQDSMSSDTA

SEQ ID NO: 46896 - protein, 10 aa, Artificial Sequence
  Description of Artificial Sequence: Synthetic epitope
SQDSTNHTQA

SEQ ID NO: 46897 - protein, 10 aa, Artificial Sequence
  Description of Artificial Sequence: Synthetic epitope
SQDSVNTSRE

SEQ ID NO: 46898 - protein, 10 aa, Artificial Sequence
  Description of Artificial Sequence: Synthetic epitope
SQDTIRNQVR

SEQ ID NO: 46899 - protein, 10 aa, Artificial Sequence
  Description of Artificial Sequence: Synthetic epitope
SQDTKLIPDS

SEQ ID NO: 46900 - protein, 10 aa, Artificial Sequence
  Description of Artificial Sequence: Synthetic epitope
SQDTSEKSQD

SEQ ID NO: 46901 - protein, 10 aa, Artificial Sequence
  Description of Artificial Sequence: Synthetic epitope
SQDVARVSSA

SEQ ID NO: 46902 - protein, 10 aa, Artificial Sequence
  Description of Artificial Sequence: Synthetic epitope
SQDVKATVRN

SEQ ID NO: 46903 - protein, 10 aa, Artificial Sequence
  Description of Artificial Sequence: Synthetic epitope
SQDVMQQATN

SEQ ID NO: 46904 - protein, 10 aa, Artificial Sequence
  Description of Artificial Sequence: Synthetic epitope
SQEAEYHSQS

SEQ ID NO: 46905 - protein, 10 aa, Artificial Sequence
  Description of Artificial Sequence: Synthetic epitope
SQEALESSED

SEQ ID NO: 46906 - protein, 10 aa, Artificial Sequence
  Description of Artificial Sequence: Synthetic epitope
SQEALNREEA

SEQ ID NO: 46907 - protein, 10 aa, Artificial Sequence
  Description of Artificial Sequence: Synthetic epitope
SQEARQADRE

SEQ ID NO: 46908 - protein, 10 aa, Artificial Sequence
  Description of Artificial Sequence: Synthetic epitope
SQEEAQAVDQ

SEQ ID NO: 46909 - protein, 10 aa, Artificial Sequence
  Description of Artificial Sequence: Synthetic epitope
SQEEMSPGMS

SEQ ID NO: 46910 - protein, 10 aa, Artificial Sequence
  Description of Artificial Sequence: Synthetic epitope
SQEETSTPTQ

SEQ ID NO: 46911 - protein, 10 aa, Artificial Sequence
  Description of Artificial Sequence: Synthetic epitope
SQEEVVLADL

SEQ ID NO: 46912 - protein, 10 aa, Artificial Sequence
  Description of Artificial Sequence: Synthetic epitope
SQEFQEFKQT

SEQ ID NO: 46913 - protein, 10 aa, Artificial Sequence
  Description of Artificial Sequence: Synthetic epitope
SQEGLQSHSS

SEQ ID NO: 46914 - protein, 10 aa, Artificial Sequence
  Description of Artificial Sequence: Synthetic epitope
SQEGSASSTK

SEQ ID NO: 46915 - protein, 10 aa, Artificial Sequence
  Description of Artificial Sequence: Synthetic epitope
SQEINKNEER

SEQ ID NO: 46916 - protein, 10 aa, Artificial Sequence
  Description of Artificial Sequence: Synthetic epitope
SQEITTNSEQ

SEQ ID NO: 46917 - protein, 10 aa, Artificial Sequence
  Description of Artificial Sequence: Synthetic epitope
SQEKQAEILE

SEQ ID NO: 46918 - protein, 10 aa, Artificial Sequence
  Description of Artificial Sequence: Synthetic epitope
SQEKSASTTA

SEQ ID NO: 46919 - protein, 10 aa, Artificial Sequence
  Description of Artificial Sequence: Synthetic epitope
SQELFQQRAQ

SEQ ID NO: 46920 - protein, 10 aa, Artificial Sequence
  Description of Artificial Sequence: Synthetic epitope
SQELLASASE

SEQ ID NO: 46921 - protein, 10 aa, Artificial Sequence
  Description of Artificial Sequence: Synthetic epitope
SQELRQARGQ

SEQ ID NO: 46922 - protein, 10 aa, Artificial Sequence
  Description of Artificial Sequence: Synthetic epitope
SQEMSVNSPT

SEQ ID NO: 46923 - protein, 10 aa, Artificial Sequence
  Description of Artificial Sequence: Synthetic epitope
SQENQAETHA

SEQ ID NO: 46924 - protein, 10 aa, Artificial Sequence
  Description of Artificial Sequence: Synthetic epitope
SQEPSSFQES

SEQ ID NO: 46925 - protein, 10 aa, Artificial Sequence
  Description of Artificial Sequence: Synthetic epitope
SQEQKNLAAI

SEQ ID NO: 46926 - protein, 10 aa, Artificial Sequence
  Description of Artificial Sequence: Synthetic epitope
SQERGQLEAN

SEQ ID NO: 46927 - protein, 10 aa, Artificial Sequence
  Description of Artificial Sequence: Synthetic epitope
SQERNRRASI

SEQ ID NO: 46928 - protein, 10 aa, Artificial Sequence
  Description of Artificial Sequence: Synthetic epitope
SQESLVTSPS

SEQ ID NO: 46929 - protein, 10 aa, Artificial Sequence
  Description of Artificial Sequence: Synthetic epitope
SQESNKISQD

SEQ ID NO: 46930 - protein, 10 aa, Artificial Sequence
  Description of Artificial Sequence: Synthetic epitope
SQESNSKVTA

SEQ ID NO: 46931 - protein, 10 aa, Artificial Sequence
  Description of Artificial Sequence: Synthetic epitope
SQESQESDLS

SEQ ID NO: 46932 - protein, 10 aa, Artificial Sequence
  Description of Artificial Sequence: Synthetic epitope
SQESTADLSG

SEQ ID NO: 46933 - protein, 10 aa, Artificial Sequence
  Description of Artificial Sequence: Synthetic epitope
SQETAEKEVK

SEQ ID NO: 46934 - protein, 10 aa, Artificial Sequence
  Description of Artificial Sequence: Synthetic epitope
SQETANRLDT

SEQ ID NO: 46935 - protein, 10 aa, Artificial Sequence
  Description of Artificial Sequence: Synthetic epitope
SQETKIQHEE

SEQ ID NO: 46936 - protein, 10 aa, Artificial Sequence
  Description of Artificial Sequence: Synthetic epitope
SQETSANISH

SEQ ID NO: 46937 - protein, 10 aa, Artificial Sequence
  Description of Artificial Sequence: Synthetic epitope
SQEVEAKELS

SEQ ID NO: 46938 - protein, 10 aa, Artificial Sequence
  Description of Artificial Sequence: Synthetic epitope
SQEVSSTSNQ

SEQ ID NO: 46939 - protein, 10 aa, Artificial Sequence
  Description of Artificial Sequence: Synthetic epitope
SQFFEKVHEE

SEQ ID NO: 46940 - protein, 10 aa, Artificial Sequence
  Description of Artificial Sequence: Synthetic epitope
SQFLVTVPIK

SEQ ID NO: 46941 - protein, 10 aa, Artificial Sequence
  Description of Artificial Sequence: Synthetic epitope
SQFNSSVSEL

SEQ ID NO: 46942 - protein, 10 aa, Artificial Sequence
  Description of Artificial Sequence: Synthetic epitope
SQFRSSDANY

SEQ ID NO: 46943 - protein, 10 aa, Artificial Sequence
  Description of Artificial Sequence: Synthetic epitope
SQFRTASTYI

SEQ ID NO: 46944 - protein, 10 aa, Artificial Sequence
  Description of Artificial Sequence: Synthetic epitope
SQFSPSLISE

SEQ ID NO: 46945 - protein, 10 aa, Artificial Sequence
  Description of Artificial Sequence: Synthetic epitope
SQFTDLNGSK

SEQ ID NO: 46946 - protein, 10 aa, Artificial Sequence
  Description of Artificial Sequence: Synthetic epitope
SQFVEIMPLK

SEQ ID NO: 46947 - protein, 10 aa, Artificial Sequence
  Description of Artificial Sequence: Synthetic epitope
SQGAALSGEP

SEQ ID NO: 46948 - protein, 10 aa, Artificial Sequence
  Description of Artificial Sequence: Synthetic epitope
SQGAEGALEE

SEQ ID NO: 46949 - protein, 10 aa, Artificial Sequence
  Description of Artificial Sequence: Synthetic epitope
SQGDSKNAKK

SEQ ID NO: 46950 - protein, 10 aa, Artificial Sequence
  Description of Artificial Sequence: Synthetic epitope
SQGEVEREGE

SEQ ID NO: 46951 - protein, 10 aa, Artificial Sequence
  Description of Artificial Sequence: Synthetic epitope
SQGEVQPNFS

SEQ ID NO: 46952 - protein, 10 aa, Artificial Sequence
  Description of Artificial Sequence: Synthetic epitope
SQGISQTVSD

SEQ ID NO: 46953 - protein, 10 aa, Artificial Sequence
  Description of Artificial Sequence: Synthetic epitope
SQGKTAAVAN

SEQ ID NO: 46954 - protein, 10 aa, Artificial Sequence
  Description of Artificial Sequence: Synthetic epitope
SQGLQSKLES

SEQ ID NO: 46955 - protein, 10 aa, Artificial Sequence
  Description of Artificial Sequence: Synthetic epitope
SQGNNSEVRE

SEQ ID NO: 46956 - protein, 10 aa, Artificial Sequence
  Description of Artificial Sequence: Synthetic epitope
SQGQASASAK

SEQ ID NO: 46957 - protein, 10 aa, Artificial Sequence
  Description of Artificial Sequence: Synthetic epitope
SQGQLNEKPL

SEQ ID NO: 46958 - protein, 10 aa, Artificial Sequence
  Description of Artificial Sequence: Synthetic epitope
SQGQQAVVKA

SEQ ID NO: 46959 - protein, 10 aa, Artificial Sequence
  Description of Artificial Sequence: Synthetic epitope
SQGQRENPTE

SEQ ID NO: 46960 - protein, 10 aa, Artificial Sequence
  Description of Artificial Sequence: Synthetic epitope
SQGRSNKALH

SEQ ID NO: 46961 - protein, 10 aa, Artificial Sequence
  Description of Artificial Sequence: Synthetic epitope
SQGSATKPIS

SEQ ID NO: 46962 - protein, 10 aa, Artificial Sequence
  Description of Artificial Sequence: Synthetic epitope
SQGSEIASQG

SEQ ID NO: 46963 - protein, 10 aa, Artificial Sequence
  Description of Artificial Sequence: Synthetic epitope
SQGSLSSAKN

SEQ ID NO: 46964 - protein, 10 aa, Artificial Sequence
  Description of Artificial Sequence: Synthetic epitope
SQGSQLSRGE

SEQ ID NO: 46965 - protein, 10 aa, Artificial Sequence
  Description of Artificial Sequence: Synthetic epitope
SQGSQLSTES

SEQ ID NO: 46966 - protein, 10 aa, Artificial Sequence
  Description of Artificial Sequence: Synthetic epitope
SQGSSQAQET

SEQ ID NO: 46967 - protein, 10 aa, Artificial Sequence
  Description of Artificial Sequence: Synthetic epitope
SQGSVASSTG

SEQ ID NO: 46968 - protein, 10 aa, Artificial Sequence
  Description of Artificial Sequence: Synthetic epitope
SQGVDPRSTF

SEQ ID NO: 46969 - protein, 10 aa, Artificial Sequence
  Description of Artificial Sequence: Synthetic epitope
SQGVSAVQQK

SEQ ID NO: 46970 - protein, 10 aa, Artificial Sequence
  Description of Artificial Sequence: Synthetic epitope
SQHLWYREQP

SEQ ID NO: 46971 - protein, 10 aa, Artificial Sequence
  Description of Artificial Sequence: Synthetic epitope
SQHNTMEVDG

SEQ ID NO: 46972 - protein, 10 aa, Artificial Sequence
  Description of Artificial Sequence: Synthetic epitope
SQHQIQEEQE

SEQ ID NO: 46973 - protein, 10 aa, Artificial Sequence
  Description of Artificial Sequence: Synthetic epitope
SQHSEASQGP

SEQ ID NO: 46974 - protein, 10 aa, Artificial Sequence
  Description of Artificial Sequence: Synthetic epitope
SQHTKTGLSS

SEQ ID NO: 46975 - protein, 10 aa, Artificial Sequence
  Description of Artificial Sequence: Synthetic epitope
SQHTLSQFAE

SEQ ID NO: 46976 - protein, 10 aa, Artificial Sequence
  Description of Artificial Sequence: Synthetic epitope
SQHTVNTELE

SEQ ID NO: 46977 - protein, 10 aa, Artificial Sequence
  Description of Artificial Sequence: Synthetic epitope
SQHVAKIVTQ

SEQ ID NO: 46978 - protein, 10 aa, Artificial Sequence
  Description of Artificial Sequence: Synthetic epitope
SQIAAQRKKA

SEQ ID NO: 46979 - protein, 10 aa, Artificial Sequence
  Description of Artificial Sequence: Synthetic epitope
SQIAKIVAAD

SEQ ID NO: 46980 - protein, 10 aa, Artificial Sequence
  Description of Artificial Sequence: Synthetic epitope
SQIDQAIVKS

SEQ ID NO: 46981 - protein, 10 aa, Artificial Sequence
  Description of Artificial Sequence: Synthetic epitope
SQIDVNNEFE

SEQ ID NO: 46982 - protein, 10 aa, Artificial Sequence
  Description of Artificial Sequence: Synthetic epitope
SQIGNTESEL

SEQ ID NO: 46983 - protein, 10 aa, Artificial Sequence
  Description of Artificial Sequence: Synthetic epitope
SQIKDAQLQN

SEQ ID NO: 46984 - protein, 10 aa, Artificial Sequence
  Description of Artificial Sequence: Synthetic epitope
SQIKEKMARE

SEQ ID NO: 46985 - protein, 10 aa, Artificial Sequence
  Description of Artificial Sequence: Synthetic epitope
SQIKFSPVAK

SEQ ID NO: 46986 - protein, 10 aa, Artificial Sequence
  Description of Artificial Sequence: Synthetic epitope
SQIKVDKVQI

SEQ ID NO: 46987 - protein, 10 aa, Artificial Sequence
  Description of Artificial Sequence: Synthetic epitope
SQILEVKSGS

SEQ ID NO: 46988 - protein, 10 aa, Artificial Sequence
  Description of Artificial Sequence: Synthetic epitope
SQILQMQRLQ

SEQ ID NO: 46989 - protein, 10 aa, Artificial Sequence
  Description of Artificial Sequence: Synthetic epitope
SQILRKVSDS

SEQ ID NO: 46990 - protein, 10 aa, Artificial Sequence
  Description of Artificial Sequence: Synthetic epitope
SQIPSSVNKS

SEQ ID NO: 46991 - protein, 10 aa, Artificial Sequence
  Description of Artificial Sequence: Synthetic epitope
SQIQKEATAQ

SEQ ID NO: 46992 - protein, 10 aa, Artificial Sequence
  Description of Artificial Sequence: Synthetic epitope
SQIQKTRRKM

SEQ ID NO: 46993 - protein, 10 aa, Artificial Sequence
  Description of Artificial Sequence: Synthetic epitope
SQISAKNSAD

SEQ ID NO: 46994 - protein, 10 aa, Artificial Sequence
  Description of Artificial Sequence: Synthetic epitope
SQISDMSTLL

SEQ ID NO: 46995 - protein, 10 aa, Artificial Sequence
  Description of Artificial Sequence: Synthetic epitope
SQISLSKKAA

SEQ ID NO: 46996 - protein, 10 aa, Artificial Sequence
  Description of Artificial Sequence: Synthetic epitope
SQISTGINPA

SEQ ID NO: 46997 - protein, 10 aa, Artificial Sequence
  Description of Artificial Sequence: Synthetic epitope
SQITSLVTEE

SEQ ID NO: 46998 - protein, 10 aa, Artificial Sequence
  Description of Artificial Sequence: Synthetic epitope
SQITSQVTGQ

SEQ ID NO: 46999 - protein, 10 aa, Artificial Sequence
  Description of Artificial Sequence: Synthetic epitope
SQKAKETVST

SEQ ID NO: 47000 - protein, 10 aa, Artificial Sequence
  Description of Artificial Sequence: Synthetic epitope
SQKASQSRPN

SEQ ID NO: 47001 - protein, 10 aa, Artificial Sequence
  Description of Artificial Sequence: Synthetic epitope
SQKGVNSDAI

SEQ ID NO: 47002 - protein, 10 aa, Artificial Sequence
  Description of Artificial Sequence: Synthetic epitope
SQKIHAEVQL

SEQ ID NO: 47003 - protein, 10 aa, Artificial Sequence
  Description of Artificial Sequence: Synthetic epitope
SQKKERFIGL

SEQ ID NO: 47004 - protein, 10 aa, Artificial Sequence
  Description of Artificial Sequence: Synthetic epitope
SQKKLSYKQL

SEQ ID NO: 47005 - protein, 10 aa, Artificial Sequence
  Description of Artificial Sequence: Synthetic epitope
SQKKMANSSP

SEQ ID NO: 47006 - protein, 10 aa, Artificial Sequence
  Description of Artificial Sequence: Synthetic epitope
SQKLHQITSQ

SEQ ID NO: 47007 - protein, 10 aa, Artificial Sequence
  Description of Artificial Sequence: Synthetic epitope
SQKLVSVEAF

SEQ ID NO: 47008 - protein, 10 aa, Artificial Sequence
  Description of Artificial Sequence: Synthetic epitope
SQKMKKAKEQ

SEQ ID NO: 47009 - protein, 10 aa, Artificial Sequence
  Description of Artificial Sequence: Synthetic epitope
SQKMQEQKNE

SEQ ID NO: 47010 - protein, 10 aa, Artificial Sequence
  Description of Artificial Sequence: Synthetic epitope
SQKNLGDTDA

SEQ ID NO: 47011 - protein, 10 aa, Artificial Sequence
  Description of Artificial Sequence: Synthetic epitope
SQKQAAKGGE

SEQ ID NO: 47012 - protein, 10 aa, Artificial Sequence
  Description of Artificial Sequence: Synthetic epitope
SQKQISIQHR

SEQ ID NO: 47013 - protein, 10 aa, Artificial Sequence
  Description of Artificial Sequence: Synthetic epitope
SQKQVKVEMS

SEQ ID NO: 47014 - protein, 10 aa, Artificial Sequence
  Description of Artificial Sequence: Synthetic epitope
SQKREARLDK

SEQ ID NO: 47015 - protein, 10 aa, Artificial Sequence
  Description of Artificial Sequence: Synthetic epitope
SQKRGISSEE

SEQ ID NO: 47016 - protein, 10 aa, Artificial Sequence
  Description of Artificial Sequence: Synthetic epitope
SQKSFQQLTM

SEQ ID NO: 47017 - protein, 10 aa, Artificial Sequence
  Description of Artificial Sequence: Synthetic epitope
SQKSSTKQPT

SEQ ID NO: 47018 - protein, 10 aa, Artificial Sequence
  Description of Artificial Sequence: Synthetic epitope
SQKTHGKINN

SEQ ID NO: 47019 - protein, 10 aa, Artificial Sequence
  Description of Artificial Sequence: Synthetic epitope
SQKTQRHIQR

SEQ ID NO: 47020 - protein, 10 aa, Artificial Sequence
  Description of Artificial Sequence: Synthetic epitope
SQKTVTTASM

SEQ ID NO: 47021 - protein, 10 aa, Artificial Sequence
  Description of Artificial Sequence: Synthetic epitope
SQKVFSSTSV

SEQ ID NO: 47022 - protein, 10 aa, Artificial Sequence
  Description of Artificial Sequence: Synthetic epitope
SQKYNSRSNR

SEQ ID NO: 47023 - protein, 10 aa, Artificial Sequence
  Description of Artificial Sequence: Synthetic epitope
SQLDDEQQEA

SEQ ID NO: 47024 - protein, 10 aa, Artificial Sequence
  Description of Artificial Sequence: Synthetic epitope
SQLEAEIKEA

SEQ ID NO: 47025 - protein, 10 aa, Artificial Sequence
  Description of Artificial Sequence: Synthetic epitope
SQLEAFQAKM

SEQ ID NO: 47026 - protein, 10 aa, Artificial Sequence
  Description of Artificial Sequence: Synthetic epitope
SQLEALAAEQ

SEQ ID NO: 47027 - protein, 10 aa, Artificial Sequence
  Description of Artificial Sequence: Synthetic epitope
SQLEIEVLNT

SEQ ID NO: 47028 - protein, 10 aa, Artificial Sequence
  Description of Artificial Sequence: Synthetic epitope
SQLEKGQLLS

SEQ ID NO: 47029 - protein, 10 aa, Artificial Sequence
  Description of Artificial Sequence: Synthetic epitope
SQLEKRVSRS

SEQ ID NO: 47030 - protein, 10 aa, Artificial Sequence
  Description of Artificial Sequence: Synthetic epitope
SQLEYYASSP

SEQ ID NO: 47031 - protein, 10 aa, Artificial Sequence
  Description of Artificial Sequence: Synthetic epitope
SQLFAMIEAD

SEQ ID NO: 47032 - protein, 10 aa, Artificial Sequence
  Description of Artificial Sequence: Synthetic epitope
SQLITQRAQV

SEQ ID NO: 47033 - protein, 10 aa, Artificial Sequence
  Description of Artificial Sequence: Synthetic epitope
SQLKDQQDVF

SEQ ID NO: 47034 - protein, 10 aa, Artificial Sequence
  Description of Artificial Sequence: Synthetic epitope
SQLKVSLELS

SEQ ID NO: 47035 - protein, 10 aa, Artificial Sequence
  Description of Artificial Sequence: Synthetic epitope
SQLLDAETAE

SEQ ID NO: 47036 - protein, 10 aa, Artificial Sequence
  Description of Artificial Sequence: Synthetic epitope
SQLLHQAEVA

SEQ ID NO: 47037 - protein, 10 aa, Artificial Sequence
  Description of Artificial Sequence: Synthetic epitope
SQLLPMAEQL

SEQ ID NO: 47038 - protein, 10 aa, Artificial Sequence
  Description of Artificial Sequence: Synthetic epitope
SQLLSATLVD

SEQ ID NO: 47039 - protein, 10 aa, Artificial Sequence
  Description of Artificial Sequence: Synthetic epitope
SQLLSVSEGE

SEQ ID NO: 47040 - protein, 10 aa, Artificial Sequence
  Description of Artificial Sequence: Synthetic epitope
SQLNKSQSHM

SEQ ID NO: 47041 - protein, 10 aa, Artificial Sequence
  Description of Artificial Sequence: Synthetic epitope
SQLNMGRFGE

SEQ ID NO: 47042 - protein, 10 aa, Artificial Sequence
  Description of Artificial Sequence: Synthetic epitope
SQLPINMMQP

SEQ ID NO: 47043 - protein, 10 aa, Artificial Sequence
  Description of Artificial Sequence: Synthetic epitope
SQLQPAADQA

SEQ ID NO: 47044 - protein, 10 aa, Artificial Sequence
  Description of Artificial Sequence: Synthetic epitope
SQLQQVQLER

SEQ ID NO: 47045 - protein, 10 aa, Artificial Sequence
  Description of Artificial Sequence: Synthetic epitope
SQLQSMQTES

SEQ ID NO: 47046 - protein, 10 aa, Artificial Sequence
  Description of Artificial Sequence: Synthetic epitope
SQLRSELAKG

SEQ ID NO: 47047 - protein, 10 aa, Artificial Sequence
  Description of Artificial Sequence: Synthetic epitope
SQLSAASPDT

SEQ ID NO: 47048 - protein, 10 aa, Artificial Sequence
  Description of Artificial Sequence: Synthetic epitope
SQLSKEIANN

SEQ ID NO: 47049 - protein, 10 aa, Artificial Sequence
  Description of Artificial Sequence: Synthetic epitope
SQLSNKKQSN

SEQ ID NO: 47050 - protein, 10 aa, Artificial Sequence
  Description of Artificial Sequence: Synthetic epitope
SQLSQQEGIK

SEQ ID NO: 47051 - protein, 10 aa, Artificial Sequence
  Description of Artificial Sequence: Synthetic epitope
SQLSQTESGH

SEQ ID NO: 47052 - protein, 10 aa, Artificial Sequence
  Description of Artificial Sequence: Synthetic epitope
SQLSRGSATT

SEQ ID NO: 47053 - protein, 10 aa, Artificial Sequence
  Description of Artificial Sequence: Synthetic epitope
SQLSRTAALH

SEQ ID NO: 47054 - protein, 10 aa, Artificial Sequence
  Description of Artificial Sequence: Synthetic epitope
SQLSSADLSL

SEQ ID NO: 47055 - protein, 10 aa, Artificial Sequence
  Description of Artificial Sequence: Synthetic epitope
SQLSSLQALD

SEQ ID NO: 47056 - protein, 10 aa, Artificial Sequence
  Description of Artificial Sequence: Synthetic epitope
SQLSSQVEQF

SEQ ID NO: 47057 - protein, 10 aa, Artificial Sequence
  Description of Artificial Sequence: Synthetic epitope
SQLSSTKGSR

SEQ ID NO: 47058 - protein, 10 aa, Artificial Sequence
  Description of Artificial Sequence: Synthetic epitope
SQLSSTKSKK

SEQ ID NO: 47059 - protein, 10 aa, Artificial Sequence
  Description of Artificial Sequence: Synthetic epitope
SQLSVSQDSD

SEQ ID NO: 47060 - protein, 10 aa, Artificial Sequence
  Description of Artificial Sequence: Synthetic epitope
SQLTESSQTS

SEQ ID NO: 47061 - protein, 10 aa, Artificial Sequence
  Description of Artificial Sequence: Synthetic epitope
SQLTPQTVME

SEQ ID NO: 47062 - protein, 10 aa, Artificial Sequence
  Description of Artificial Sequence: Synthetic epitope
SQLTSLEMKD

SEQ ID NO: 47063 - protein, 10 aa, Artificial Sequence
  Description of Artificial Sequence: Synthetic epitope
SQLTVETGDA

SEQ ID NO: 47064 - protein, 10 aa, Artificial Sequence
  Description of Artificial Sequence: Synthetic epitope
SQLVEYKEEM

SEQ ID NO: 47065 - protein, 10 aa, Artificial Sequence
  Description of Artificial Sequence: Synthetic epitope
SQLVNEQQES

SEQ ID NO: 47066 - protein, 10 aa, Artificial Sequence
  Description of Artificial Sequence: Synthetic epitope
SQLVRVSKNY

SEQ ID NO: 47067 - protein, 10 aa, Artificial Sequence
  Description of Artificial Sequence: Synthetic epitope
SQLYSVAKHH

SEQ ID NO: 47068 - protein, 10 aa, Artificial Sequence
  Description of Artificial Sequence: Synthetic epitope
SQMANSSREK

SEQ ID NO: 47069 - protein, 10 aa, Artificial Sequence
  Description of Artificial Sequence: Synthetic epitope
SQMDTLKTKG

SEQ ID NO: 47070 - protein, 10 aa, Artificial Sequence
  Description of Artificial Sequence: Synthetic epitope
SQMELKTGKG

SEQ ID NO: 47071 - protein, 10 aa, Artificial Sequence
  Description of Artificial Sequence: Synthetic epitope
SQMGIRSSIA

SEQ ID NO: 47072 - protein, 10 aa, Artificial Sequence
  Description of Artificial Sequence: Synthetic epitope
SQMLQVNVEA

SEQ ID NO: 47073 - protein, 10 aa, Artificial Sequence
  Description of Artificial Sequence: Synthetic epitope
SQMMPDVSIQ

SEQ ID NO: 47074 - protein, 10 aa, Artificial Sequence
  Description of Artificial Sequence: Synthetic epitope
SQMNNIMSKS

SEQ ID NO: 47075 - protein, 10 aa, Artificial Sequence
  Description of Artificial Sequence: Synthetic epitope
SQMNSQTEDH

SEQ ID NO: 47076 - protein, 10 aa, Artificial Sequence
  Description of Artificial Sequence: Synthetic epitope
SQMPLENTTV

SEQ ID NO: 47077 - protein, 10 aa, Artificial Sequence
  Description of Artificial Sequence: Synthetic epitope
SQMQERNNAG

SEQ ID NO: 47078 - protein, 10 aa, Artificial Sequence
  Description of Artificial Sequence: Synthetic epitope
SQMQSEPQKE

SEQ ID NO: 47079 - protein, 10 aa, Artificial Sequence
  Description of Artificial Sequence: Synthetic epitope
SQMSVPEQAE

SEQ ID NO: 47080 - protein, 10 aa, Artificial Sequence
  Description of Artificial Sequence: Synthetic epitope
SQMVDLKSQS

SEQ ID NO: 47081 - protein, 10 aa, Artificial Sequence
  Description of Artificial Sequence: Synthetic epitope
SQNAGQKNQS

SEQ ID NO: 47082 - protein, 10 aa, Artificial Sequence
  Description of Artificial Sequence: Synthetic epitope
SQNDGTEQYV

SEQ ID NO: 47083 - protein, 10 aa, Artificial Sequence
  Description of Artificial Sequence: Synthetic epitope
SQNDLPWEFM

SEQ ID NO: 47084 - protein, 10 aa, Artificial Sequence
  Description of Artificial Sequence: Synthetic epitope
SQNDMTSEKH

SEQ ID NO: 47085 - protein, 10 aa, Artificial Sequence
  Description of Artificial Sequence: Synthetic epitope
SQNESENEGH

SEQ ID NO: 47086 - protein, 10 aa, Artificial Sequence
  Description of Artificial Sequence: Synthetic epitope
SQNHIPIEPD

SEQ ID NO: 47087 - protein, 10 aa, Artificial Sequence
  Description of Artificial Sequence: Synthetic epitope
SQNIEESAYF

SEQ ID NO: 47088 - protein, 10 aa, Artificial Sequence
  Description of Artificial Sequence: Synthetic epitope
SQNILSISKL

SEQ ID NO: 47089 - protein, 10 aa, Artificial Sequence
  Description of Artificial Sequence: Synthetic epitope
SQNLGFISAS

SEQ ID NO: 47090 - protein, 10 aa, Artificial Sequence
  Description of Artificial Sequence: Synthetic epitope
SQNLLZSBGB

SEQ ID NO: 47091 - protein, 10 aa, Artificial Sequence
  Description of Artificial Sequence: Synthetic epitope
SQNLPSSLGQ

SEQ ID NO: 47092 - protein, 10 aa, Artificial Sequence
  Description of Artificial Sequence: Synthetic epitope
SQNMQFMSSQ

SEQ ID NO: 47093 - protein, 10 aa, Artificial Sequence
  Description of Artificial Sequence: Synthetic epitope
SQNNEGTPTQ

SEQ ID NO: 47094 - protein, 10 aa, Artificial Sequence
  Description of Artificial Sequence: Synthetic epitope
SQNNTSAVKE

SEQ ID NO: 47095 - protein, 10 aa, Artificial Sequence
  Description of Artificial Sequence: Synthetic epitope
SQNRQLKSHY

SEQ ID NO: 47096 - protein, 10 aa, Artificial Sequence
  Description of Artificial Sequence: Synthetic epitope
SQNSLTKIVP

SEQ ID NO: 47097 - protein, 10 aa, Artificial Sequence
  Description of Artificial Sequence: Synthetic epitope
SQNSMSSHGK

SEQ ID NO: 47098 - protein, 10 aa, Artificial Sequence
  Description of Artificial Sequence: Synthetic epitope
SQNSRSQHRR

SEQ ID NO: 47099 - protein, 10 aa, Artificial Sequence
  Description of Artificial Sequence: Synthetic epitope
SQNSTEIGSF

SEQ ID NO: 47100 - protein, 10 aa, Artificial Sequence
  Description of Artificial Sequence: Synthetic epitope
SQNTGLTTKK

SEQ ID NO: 47101 - protein, 10 aa, Artificial Sequence
  Description of Artificial Sequence: Synthetic epitope
SQNVEEQSPS

SEQ ID NO: 47102 - protein, 10 aa, Artificial Sequence
  Description of Artificial Sequence: Synthetic epitope
SQNVTVLRDK

SEQ ID NO: 47103 - protein, 10 aa, Artificial Sequence
  Description of Artificial Sequence: Synthetic epitope
SQPAASTLES

SEQ ID NO: 47104 - protein, 10 aa, Artificial Sequence
  Description of Artificial Sequence: Synthetic epitope
SQPAKLAEAF

SEQ ID NO: 47105 - protein, 10 aa, Artificial Sequence
  Description of Artificial Sequence: Synthetic epitope
SQPAKLVMVK

SEQ ID NO: 47106 - protein, 10 aa, Artificial Sequence
  Description of Artificial Sequence: Synthetic epitope
SQPANSQTAA

SEQ ID NO: 47107 - protein, 10 aa, Artificial Sequence
  Description of Artificial Sequence: Synthetic epitope
SQPASRYSSR

SEQ ID NO: 47108 - protein, 10 aa, Artificial Sequence
  Description of Artificial Sequence: Synthetic epitope
SQPAVSIEGQ

SEQ ID NO: 47109 - protein, 10 aa, Artificial Sequence
  Description of Artificial Sequence: Synthetic epitope
SQPEQAREKK

SEQ ID NO: 47110 - protein, 10 aa, Artificial Sequence
  Description of Artificial Sequence: Synthetic epitope
SQPIAILQTS

SEQ ID NO: 47111 - protein, 10 aa, Artificial Sequence
  Description of Artificial Sequence: Synthetic epitope
SQPISTKSEN

SEQ ID NO: 47112 - protein, 10 aa, Artificial Sequence
  Description of Artificial Sequence: Synthetic epitope
SQPKGTKGQN

SEQ ID NO: 47113 - protein, 10 aa, Artificial Sequence
  Description of Artificial Sequence: Synthetic epitope
SQPLMSIPST

SEQ ID NO: 47114 - protein, 10 aa, Artificial Sequence
  Description of Artificial Sequence: Synthetic epitope
SQPLREQSED

SEQ ID NO: 47115 - protein, 10 aa, Artificial Sequence
  Description of Artificial Sequence: Synthetic epitope
SQPLVVSSHD

SEQ ID NO: 47116 - protein, 10 aa, Artificial Sequence
  Description of Artificial Sequence: Synthetic epitope
SQPQDNSQVH

SEQ ID NO: 47117 - protein, 10 aa, Artificial Sequence
  Description of Artificial Sequence: Synthetic epitope
SQPSGRLQAN

SEQ ID NO: 47118 - protein, 10 aa, Artificial Sequence
  Description of Artificial Sequence: Synthetic epitope
SQPSQTKPSP

SEQ ID NO: 47119 - protein, 10 aa, Artificial Sequence
  Description of Artificial Sequence: Synthetic epitope
SQQAKIESDR

SEQ ID NO: 47120 - protein, 10 aa, Artificial Sequence
  Description of Artificial Sequence: Synthetic epitope
SQQEAELLQS

SEQ ID NO: 47121 - protein, 10 aa, Artificial Sequence
  Description of Artificial Sequence: Synthetic epitope
SQQEDSLPVQ

SEQ ID NO: 47122 - protein, 10 aa, Artificial Sequence
  Description of Artificial Sequence: Synthetic epitope
SQQEEVAKNL

SEQ ID NO: 47123 - protein, 10 aa, Artificial Sequence
  Description of Artificial Sequence: Synthetic epitope
SQQENMIKKG

SEQ ID NO: 47124 - protein, 10 aa, Artificial Sequence
  Description of Artificial Sequence: Synthetic epitope
SQQEQVLDVE

SEQ ID NO: 47125 - protein, 10 aa, Artificial Sequence
  Description of Artificial Sequence: Synthetic epitope
SQQERIPHEP

SEQ ID NO: 47126 - protein, 10 aa, Artificial Sequence
  Description of Artificial Sequence: Synthetic epitope
SQQERTKNNS

SEQ ID NO: 47127 - protein, 10 aa, Artificial Sequence
  Description of Artificial Sequence: Synthetic epitope
SQQGEQLQTE

SEQ ID NO: 47128 - protein, 10 aa, Artificial Sequence
  Description of Artificial Sequence: Synthetic epitope
SQQGSSQQYL

SEQ ID NO: 47129 - protein, 10 aa, Artificial Sequence
  Description of Artificial Sequence: Synthetic epitope
SQQIRVRNRP

SEQ ID NO: 47130 - protein, 10 aa, Artificial Sequence
  Description of Artificial Sequence: Synthetic epitope
SQQITTAPST

SEQ ID NO: 47131 - protein, 10 aa, Artificial Sequence
  Description of Artificial Sequence: Synthetic epitope
SQQKQEIEAL

SEQ ID NO: 47132 - protein, 10 aa, Artificial Sequence
  Description of Artificial Sequence: Synthetic epitope
SQQKQIFRNH

SEQ ID NO: 47133 - protein, 10 aa, Artificial Sequence
  Description of Artificial Sequence: Synthetic epitope
SQQKRFLAQF

SEQ ID NO: 47134 - protein, 10 aa, Artificial Sequence
  Description of Artificial Sequence: Synthetic epitope
SQQLGNSNNL

SEQ ID NO: 47135 - protein, 10 aa, Artificial Sequence
  Description of Artificial Sequence: Synthetic epitope
SQQLRKAQLQ

SEQ ID NO: 47136 - protein, 10 aa, Artificial Sequence
  Description of Artificial Sequence: Synthetic epitope
SQQMKGKQLA

SEQ ID NO: 47137 - protein, 10 aa, Artificial Sequence
  Description of Artificial Sequence: Synthetic epitope
SQQPKQQENG

SEQ ID NO: 47138 - protein, 10 aa, Artificial Sequence
  Description of Artificial Sequence: Synthetic epitope
SQQREIRGPA

SEQ ID NO: 47139 - protein, 10 aa, Artificial Sequence
  Description of Artificial Sequence: Synthetic epitope
SQQRESLLAE

SEQ ID NO: 47140 - protein, 10 aa, Artificial Sequence
  Description of Artificial Sequence: Synthetic epitope
SQQSAVSAKG

SEQ ID NO: 47141 - protein, 10 aa, Artificial Sequence
  Description of Artificial Sequence: Synthetic epitope
SQQSKPQDAS

SEQ ID NO: 47142 - protein, 10 aa, Artificial Sequence
  Description of Artificial Sequence: Synthetic epitope
SQQSKSSEFI

SEQ ID NO: 47143 - protein, 10 aa, Artificial Sequence
  Description of Artificial Sequence: Synthetic epitope
SQQSVIQSAG

SEQ ID NO: 47144 - protein, 10 aa, Artificial Sequence
  Description of Artificial Sequence: Synthetic epitope
SQQTALFAEI

SEQ ID NO: 47145 - protein, 10 aa, Artificial Sequence
  Description of Artificial Sequence: Synthetic epitope
SQQTEDSKST

SEQ ID NO: 47146 - protein, 10 aa, Artificial Sequence
  Description of Artificial Sequence: Synthetic epitope
SQQTTVVPES

SEQ ID NO: 47147 - protein, 10 aa, Artificial Sequence
  Description of Artificial Sequence: Synthetic epitope
SQQVQTQSPT

SEQ ID NO: 47148 - protein, 10 aa, Artificial Sequence
  Description of Artificial Sequence: Synthetic epitope
SQQVQTQSPT

SEQ ID NO: 47149 - protein, 10 aa, Artificial Sequence
  Description of Artificial Sequence: Synthetic epitope
SQQYKGHKKM

SEQ ID NO: 47150 - protein, 10 aa, Artificial Sequence
  Description of Artificial Sequence: Synthetic epitope
SQRAQSAFKE

SEQ ID NO: 47151 - protein, 10 aa, Artificial Sequence
  Description of Artificial Sequence: Synthetic epitope
SQRASRVREE

SEQ ID NO: 47152 - protein, 10 aa, Artificial Sequence
  Description of Artificial Sequence: Synthetic epitope
SQREVDLEAY

SEQ ID NO: 47153 - protein, 10 aa, Artificial Sequence
  Description of Artificial Sequence: Synthetic epitope
SQRFNAISSE

SEQ ID NO: 47154 - protein, 10 aa, Artificial Sequence
  Description of Artificial Sequence: Synthetic epitope
SQRGDGEHES

SEQ ID NO: 47155 - protein, 10 aa, Artificial Sequence
  Description of Artificial Sequence: Synthetic epitope
SQRLEVSHVH

SEQ ID NO: 47156 - protein, 10 aa, Artificial Sequence
  Description of Artificial Sequence: Synthetic epitope
SQRMRRSAAG

SEQ ID NO: 47157 - protein, 10 aa, Artificial Sequence
  Description of Artificial Sequence: Synthetic epitope
SQRNRAASVI

SEQ ID NO: 47158 - protein, 10 aa, Artificial Sequence
  Description of Artificial Sequence: Synthetic epitope
SQRNTAGAQP

SEQ ID NO: 47159 - protein, 10 aa, Artificial Sequence
  Description of Artificial Sequence: Synthetic epitope
SQRPKGNHTK

SEQ ID NO: 47160 - protein, 10 aa, Artificial Sequence
  Description of Artificial Sequence: Synthetic epitope
SQRSGRQILS

SEQ ID NO: 47161 - protein, 10 aa, Artificial Sequence
  Description of Artificial Sequence: Synthetic epitope
SQRSNRSNVD

SEQ ID NO: 47162 - protein, 10 aa, Artificial Sequence
  Description of Artificial Sequence: Synthetic epitope
SQRSSQQREN

SEQ ID NO: 47163 - protein, 10 aa, Artificial Sequence
  Description of Artificial Sequence: Synthetic epitope
SQRVTTALLA

SEQ ID NO: 47164 - protein, 10 aa, Artificial Sequence
  Description of Artificial Sequence: Synthetic epitope
SQRYAYVVDA

SEQ ID NO: 47165 - protein, 10 aa, Artificial Sequence
  Description of Artificial Sequence: Synthetic epitope
SQSAASSNNT

SEQ ID NO: 47166 - protein, 10 aa, Artificial Sequence
  Description of Artificial Sequence: Synthetic epitope
SQSADRGASL

SEQ ID NO: 47167 - protein, 10 aa, Artificial Sequence
  Description of Artificial Sequence: Synthetic epitope
SQSAEEKESE

SEQ ID NO: 47168 - protein, 10 aa, Artificial Sequence
  Description of Artificial Sequence: Synthetic epitope
SQSAGVDQKE

SEQ ID NO: 47169 - protein, 10 aa, Artificial Sequence
  Description of Artificial Sequence: Synthetic epitope
SQSASSTLAA

SEQ ID NO: 47170 - protein, 10 aa, Artificial Sequence
  Description of Artificial Sequence: Synthetic epitope
SQSATLAVHH

SEQ ID NO: 47171 - protein, 10 aa, Artificial Sequence
  Description of Artificial Sequence: Synthetic epitope
SQSDFKAFAG

SEQ ID NO: 47172 - protein, 10 aa, Artificial Sequence
  Description of Artificial Sequence: Synthetic epitope
SQSEAEEKER

SEQ ID NO: 47173 - protein, 10 aa, Artificial Sequence
  Description of Artificial Sequence: Synthetic epitope
SQSEMVTGEG

SEQ ID NO: 47174 - protein, 10 aa, Artificial Sequence
  Description of Artificial Sequence: Synthetic epitope
SQSESAKAAD

SEQ ID NO: 47175 - protein, 10 aa, Artificial Sequence
  Description of Artificial Sequence: Synthetic epitope
SQSETLASQD

SEQ ID NO: 47176 - protein, 10 aa, Artificial Sequence
  Description of Artificial Sequence: Synthetic epitope
SQSEVARRFQ

SEQ ID NO: 47177 - protein, 10 aa, Artificial Sequence
  Description of Artificial Sequence: Synthetic epitope
SQSFGVASAS

SEQ ID NO: 47178 - protein, 10 aa, Artificial Sequence
  Description of Artificial Sequence: Synthetic epitope
SQSFLKSSKE

SEQ ID NO: 47179 - protein, 10 aa, Artificial Sequence
  Description of Artificial Sequence: Synthetic epitope
SQSFPTSSTY

SEQ ID NO: 47180 - protein, 10 aa, Artificial Sequence
  Description of Artificial Sequence: Synthetic epitope
SQSFSKERTE

SEQ ID NO: 47181 - protein, 10 aa, Artificial Sequence
  Description of Artificial Sequence: Synthetic epitope
SQSFVASENQ

SEQ ID NO: 47182 - protein, 10 aa, Artificial Sequence
  Description of Artificial Sequence: Synthetic epitope
SQSGHEYDPI

SEQ ID NO: 47183 - protein, 10 aa, Artificial Sequence
  Description of Artificial Sequence: Synthetic epitope
SQSIKSFDRH

SEQ ID NO: 47184 - protein, 10 aa, Artificial Sequence
  Description of Artificial Sequence: Synthetic epitope
SQSIPIFATD

SEQ ID NO: 47185 - protein, 10 aa, Artificial Sequence
  Description of Artificial Sequence: Synthetic epitope
SQSISLVQQS

SEQ ID NO: 47186 - protein, 10 aa, Artificial Sequence
  Description of Artificial Sequence: Synthetic epitope
SQSKAGSSTQ

SEQ ID NO: 47187 - protein, 10 aa, Artificial Sequence
  Description of Artificial Sequence: Synthetic epitope
SQSKDEIGFE

SEQ ID NO: 47188 - protein, 10 aa, Artificial Sequence
  Description of Artificial Sequence: Synthetic epitope
SQSKFKVKIQ

SEQ ID NO: 47189 - protein, 10 aa, Artificial Sequence
  Description of Artificial Sequence: Synthetic epitope
SQSKKFDEGE

SEQ ID NO: 47190 - protein, 10 aa, Artificial Sequence
  Description of Artificial Sequence: Synthetic epitope
SQSKVIETQL

SEQ ID NO: 47191 - protein, 10 aa, Artificial Sequence
  Description of Artificial Sequence: Synthetic epitope
SQSLALKEQN

SEQ ID NO: 47192 - protein, 10 aa, Artificial Sequence
  Description of Artificial Sequence: Synthetic epitope
SQSLDGTYQG

SEQ ID NO: 47193 - protein, 10 aa, Artificial Sequence
  Description of Artificial Sequence: Synthetic epitope
SQSLDKAAED

SEQ ID NO: 47194 - protein, 10 aa, Artificial Sequence
  Description of Artificial Sequence: Synthetic epitope
SQSLLSLEQE

SEQ ID NO: 47195 - protein, 10 aa, Artificial Sequence
  Description of Artificial Sequence: Synthetic epitope
SQSLNISQIS

SEQ ID NO: 47196 - protein, 10 aa, Artificial Sequence
  Description of Artificial Sequence: Synthetic epitope
SQSMAITYSL

SEQ ID NO: 47197 - protein, 10 aa, Artificial Sequence
  Description of Artificial Sequence: Synthetic epitope
SQSMISSIVN

SEQ ID NO: 47198 - protein, 10 aa, Artificial Sequence
  Description of Artificial Sequence: Synthetic epitope
SQSMISSIVN

SEQ ID NO: 47199 - protein, 10 aa, Artificial Sequence
  Description of Artificial Sequence: Synthetic epitope
SQSMKGKSKS

SEQ ID NO: 47200 - protein, 10 aa, Artificial Sequence
  Description of Artificial Sequence: Synthetic epitope
SQSMRKVQDS

SEQ ID NO: 47201 - protein, 10 aa, Artificial Sequence
  Description of Artificial Sequence: Synthetic epitope
SQSNLEQQKQ

SEQ ID NO: 47202 - protein, 10 aa, Artificial Sequence
  Description of Artificial Sequence: Synthetic epitope
SQSNMSAFSQ

SEQ ID NO: 47203 - protein, 10 aa, Artificial Sequence
  Description of Artificial Sequence: Synthetic epitope
SQSPLVLKQA

SEQ ID NO: 47204 - protein, 10 aa, Artificial Sequence
  Description of Artificial Sequence: Synthetic epitope
SQSQGLTRQD

SEQ ID NO: 47205 - protein, 10 aa, Artificial Sequence
  Description of Artificial Sequence: Synthetic epitope
SQSQISQVQL

SEQ ID NO: 47206 - protein, 10 aa, Artificial Sequence
  Description of Artificial Sequence: Synthetic epitope
SQSQSSYIIR

SEQ ID NO: 47207 - protein, 10 aa, Artificial Sequence
  Description of Artificial Sequence: Synthetic epitope
SQSRKSKIPR

SEQ ID NO: 47208 - protein, 10 aa, Artificial Sequence
  Description of Artificial Sequence: Synthetic epitope
SQSRSRYYRQ

SEQ ID NO: 47209 - protein, 10 aa, Artificial Sequence
  Description of Artificial Sequence: Synthetic epitope
SQSSAASTPA

SEQ ID NO: 47210 - protein, 10 aa, Artificial Sequence
  Description of Artificial Sequence: Synthetic epitope
SQSSASTYVP

SEQ ID NO: 47211 - protein, 10 aa, Artificial Sequence
  Description of Artificial Sequence: Synthetic epitope
SQSSLSLLTE

SEQ ID NO: 47212 - protein, 10 aa, Artificial Sequence
  Description of Artificial Sequence: Synthetic epitope
SQSSLVAYIE

SEQ ID NO: 47213 - protein, 10 aa, Artificial Sequence
  Description of Artificial Sequence: Synthetic epitope
SQSSPQQAVL

SEQ ID NO: 47214 - protein, 10 aa, Artificial Sequence
  Description of Artificial Sequence: Synthetic epitope
SQSTNQLDVG

SEQ ID NO: 47215 - protein, 10 aa, Artificial Sequence
  Description of Artificial Sequence: Synthetic epitope
SQSTRRGSED

SEQ ID NO: 47216 - protein, 10 aa, Artificial Sequence
  Description of Artificial Sequence: Synthetic epitope
SQSTRTATFQ

SEQ ID NO: 47217 - protein, 10 aa, Artificial Sequence
  Description of Artificial Sequence: Synthetic epitope
SQSTSLFQST

SEQ ID NO: 47218 - protein, 10 aa, Artificial Sequence
  Description of Artificial Sequence: Synthetic epitope
SQSTSREPER

SEQ ID NO: 47219 - protein, 10 aa, Artificial Sequence
  Description of Artificial Sequence: Synthetic epitope
SQSTTASLSK

SEQ ID NO: 47220 - protein, 10 aa, Artificial Sequence
  Description of Artificial Sequence: Synthetic epitope
SQSVADLPPK

SEQ ID NO: 47221 - protein, 10 aa, Artificial Sequence
  Description of Artificial Sequence: Synthetic epitope
SQSVDQLARP

SEQ ID NO: 47222 - protein, 10 aa, Artificial Sequence
  Description of Artificial Sequence: Synthetic epitope
SQSVKVSFSV

SEQ ID NO: 47223 - protein, 10 aa, Artificial Sequence
  Description of Artificial Sequence: Synthetic epitope
SQSVLVTNLK

SEQ ID NO: 47224 - protein, 10 aa, Artificial Sequence
  Description of Artificial Sequence: Synthetic epitope
SQSVNMLAKT

SEQ ID NO: 47225 - protein, 10 aa, Artificial Sequence
  Description of Artificial Sequence: Synthetic epitope
SQSVSSTTRP

SEQ ID NO: 47226 - protein, 10 aa, Artificial Sequence
  Description of Artificial Sequence: Synthetic epitope
SQSVTGSAGH

SEQ ID NO: 47227 - protein, 10 aa, Artificial Sequence
  Description of Artificial Sequence: Synthetic epitope
SQSYSSTMAN

SEQ ID NO: 47228 - protein, 10 aa, Artificial Sequence
  Description of Artificial Sequence: Synthetic epitope
SQTAASSPQD

SEQ ID NO: 47229 - protein, 10 aa, Artificial Sequence
  Description of Artificial Sequence: Synthetic epitope
SQTAQKSPRT

SEQ ID NO: 47230 - protein, 10 aa, Artificial Sequence
  Description of Artificial Sequence: Synthetic epitope
SQTDQVTTSD

SEQ ID NO: 47231 - protein, 10 aa, Artificial Sequence
  Description of Artificial Sequence: Synthetic epitope
SQTGLESVMG

SEQ ID NO: 47232 - protein, 10 aa, Artificial Sequence
  Description of Artificial Sequence: Synthetic epitope
SQTIDESLSE

SEQ ID NO: 47233 - protein, 10 aa, Artificial Sequence
  Description of Artificial Sequence: Synthetic epitope
SQTIENVRQE

SEQ ID NO: 47234 - protein, 10 aa, Artificial Sequence
  Description of Artificial Sequence: Synthetic epitope
SQTILNAKSR

SEQ ID NO: 47235 - protein, 10 aa, Artificial Sequence
  Description of Artificial Sequence: Synthetic epitope
SQTIPKAQIQ

SEQ ID NO: 47236 - protein, 10 aa, Artificial Sequence
  Description of Artificial Sequence: Synthetic epitope
SQTKSETSWE

SEQ ID NO: 47237 - protein, 10 aa, Artificial Sequence
  Description of Artificial Sequence: Synthetic epitope
SQTKTAVPPL

SEQ ID NO: 47238 - protein, 10 aa, Artificial Sequence
  Description of Artificial Sequence: Synthetic epitope
SQTLDAETDV

SEQ ID NO: 47239 - protein, 10 aa, Artificial Sequence
  Description of Artificial Sequence: Synthetic epitope
SQTLGNATME

SEQ ID NO: 47240 - protein, 10 aa, Artificial Sequence
  Description of Artificial Sequence: Synthetic epitope
SQTLMTVNEF

SEQ ID NO: 47241 - protein, 10 aa, Artificial Sequence
  Description of Artificial Sequence: Synthetic epitope
SQTNAALLQN

SEQ ID NO: 47242 - protein, 10 aa, Artificial Sequence
  Description of Artificial Sequence: Synthetic epitope
SQTNHALTGG

SEQ ID NO: 47243 - protein, 10 aa, Artificial Sequence
  Description of Artificial Sequence: Synthetic epitope
SQTNVSQSKD

SEQ ID NO: 47244 - protein, 10 aa, Artificial Sequence
  Description of Artificial Sequence: Synthetic epitope
SQTPASIKEE

SEQ ID NO: 47245 - protein, 10 aa, Artificial Sequence
  Description of Artificial Sequence: Synthetic epitope
SQTQNKASRK

SEQ ID NO: 47246 - protein, 10 aa, Artificial Sequence
  Description of Artificial Sequence: Synthetic epitope
SQTSAKIFAA

SEQ ID NO: 47247 - protein, 10 aa, Artificial Sequence
  Description of Artificial Sequence: Synthetic epitope
SQTSDLKLGN

SEQ ID NO: 47248 - protein, 10 aa, Artificial Sequence
  Description of Artificial Sequence: Synthetic epitope
SQTSENRVDN

SEQ ID NO: 47249 - protein, 10 aa, Artificial Sequence
  Description of Artificial Sequence: Synthetic epitope
SQTSRHNDRD

SEQ ID NO: 47250 - protein, 10 aa, Artificial Sequence
  Description of Artificial Sequence: Synthetic epitope
SQTSSIGSAE

SEQ ID NO: 47251 - protein, 10 aa, Artificial Sequence
  Description of Artificial Sequence: Synthetic epitope
SQTTKKASAI

SEQ ID NO: 47252 - protein, 10 aa, Artificial Sequence
  Description of Artificial Sequence: Synthetic epitope
SQTTSNTSRY

SEQ ID NO: 47253 - protein, 10 aa, Artificial Sequence
  Description of Artificial Sequence: Synthetic epitope
SQTVARLKDV

SEQ ID NO: 47254 - protein, 10 aa, Artificial Sequence
  Description of Artificial Sequence: Synthetic epitope
SQTVSILQLE

SEQ ID NO: 47255 - protein, 10 aa, Artificial Sequence
  Description of Artificial Sequence: Synthetic epitope
SQTVSVSVSQ

SEQ ID NO: 47256 - protein, 10 aa, Artificial Sequence
  Description of Artificial Sequence: Synthetic epitope
SQVAKQRKPW

SEQ ID NO: 47257 - protein, 10 aa, Artificial Sequence
  Description of Artificial Sequence: Synthetic epitope
SQVARKQTQE

SEQ ID NO: 47258 - protein, 10 aa, Artificial Sequence
  Description of Artificial Sequence: Synthetic epitope
SQVASSLQQP

SEQ ID NO: 47259 - protein, 10 aa, Artificial Sequence
  Description of Artificial Sequence: Synthetic epitope
SQVDTPIMTK

SEQ ID NO: 47260 - protein, 10 aa, Artificial Sequence
  Description of Artificial Sequence: Synthetic epitope
SQVEETSTYA

SEQ ID NO: 47261 - protein, 10 aa, Artificial Sequence
  Description of Artificial Sequence: Synthetic epitope
SQVGSFARKT

SEQ ID NO: 47262 - protein, 10 aa, Artificial Sequence
  Description of Artificial Sequence: Synthetic epitope
SQVIPVSLSS

SEQ ID NO: 47263 - protein, 10 aa, Artificial Sequence
  Description of Artificial Sequence: Synthetic epitope
SQVISEATEQ

SEQ ID NO: 47264 - protein, 10 aa, Artificial Sequence
  Description of Artificial Sequence: Synthetic epitope
SQVKELSMVT

SEQ ID NO: 47265 - protein, 10 aa, Artificial Sequence
  Description of Artificial Sequence: Synthetic epitope
SQVKGAARLA

SEQ ID NO: 47266 - protein, 10 aa, Artificial Sequence
  Description of Artificial Sequence: Synthetic epitope
SQVKTNKELL

SEQ ID NO: 47267 - protein, 10 aa, Artificial Sequence
  Description of Artificial Sequence: Synthetic epitope
SQVKYAGSQV

SEQ ID NO: 47268 - protein, 10 aa, Artificial Sequence
  Description of Artificial Sequence: Synthetic epitope
SQVLGRVLQL

SEQ ID NO: 47269 - protein, 10 aa, Artificial Sequence
  Description of Artificial Sequence: Synthetic epitope
SQVLTQSKEE

SEQ ID NO: 47270 - protein, 10 aa, Artificial Sequence
  Description of Artificial Sequence: Synthetic epitope
SQVNHHSAAS

SEQ ID NO: 47271 - protein, 10 aa, Artificial Sequence
  Description of Artificial Sequence: Synthetic epitope
SQVPASSTST

SEQ ID NO: 47272 - protein, 10 aa, Artificial Sequence
  Description of Artificial Sequence: Synthetic epitope
SQVPATKVSE

SEQ ID NO: 47273 - protein, 10 aa, Artificial Sequence
  Description of Artificial Sequence: Synthetic epitope
SQVQQTIALR

SEQ ID NO: 47274 - protein, 10 aa, Artificial Sequence
  Description of Artificial Sequence: Synthetic epitope
SQVQSPMTSR

SEQ ID NO: 47275 - protein, 10 aa, Artificial Sequence
  Description of Artificial Sequence: Synthetic epitope
SQVQYSAEPQ

SEQ ID NO: 47276 - protein, 10 aa, Artificial Sequence
  Description of Artificial Sequence: Synthetic epitope
SQVRLVVRRA

SEQ ID NO: 47277 - protein, 10 aa, Artificial Sequence
  Description of Artificial Sequence: Synthetic epitope
SQVSAVPSDP

SEQ ID NO: 47278 - protein, 10 aa, Artificial Sequence
  Description of Artificial Sequence: Synthetic epitope
SQVTQAANSG

SEQ ID NO: 47279 - protein, 10 aa, Artificial Sequence
  Description of Artificial Sequence: Synthetic epitope
SQVVLKVSQG

SEQ ID NO: 47280 - protein, 10 aa, Artificial Sequence
  Description of Artificial Sequence: Synthetic epitope
SQWASSDSKR

SEQ ID NO: 47281 - protein, 10 aa, Artificial Sequence
  Description of Artificial Sequence: Synthetic epitope
SQWNTSFASF

SEQ ID NO: 47282 - protein, 10 aa, Artificial Sequence
  Description of Artificial Sequence: Synthetic epitope
SQWRRFTEPA

SEQ ID NO: 47283 - protein, 10 aa, Artificial Sequence
  Description of Artificial Sequence: Synthetic epitope
SQYAMDIVKG

SEQ ID NO: 47284 - protein, 10 aa, Artificial Sequence
  Description of Artificial Sequence: Synthetic epitope
SQYASSEATI

SEQ ID NO: 47285 - protein, 10 aa, Artificial Sequence
  Description of Artificial Sequence: Synthetic epitope
SQYIKITSAA

SEQ ID NO: 47286 - protein, 10 aa, Artificial Sequence
  Description of Artificial Sequence: Synthetic epitope
SQYKAVKSEA

SEQ ID NO: 47287 - protein, 10 aa, Artificial Sequence
  Description of Artificial Sequence: Synthetic epitope
SQYNTEARKK

SEQ ID NO: 47288 - protein, 10 aa, Artificial Sequence
  Description of Artificial Sequence: Synthetic epitope
SQYYGAGVAR

SEQ ID NO: 47289 - protein, 10 aa, Artificial Sequence
  Description of Artificial Sequence: Synthetic epitope
SRAALAQLLK

SEQ ID NO: 47290 - protein, 10 aa, Artificial Sequence
  Description of Artificial Sequence: Synthetic epitope
SRAAMSLQEE

SEQ ID NO: 47291 - protein, 10 aa, Artificial Sequence
  Description of Artificial Sequence: Synthetic epitope
SRADAADNYP

SEQ ID NO: 47292 - protein, 10 aa, Artificial Sequence
  Description of Artificial Sequence: Synthetic epitope
SRADLELPWR

SEQ ID NO: 47293 - protein, 10 aa, Artificial Sequence
  Description of Artificial Sequence: Synthetic epitope
SRADLTAEMI

SEQ ID NO: 47294 - protein, 10 aa, Artificial Sequence
  Description of Artificial Sequence: Synthetic epitope
SRADRKLAEV

SEQ ID NO: 47295 - protein, 10 aa, Artificial Sequence
  Description of Artificial Sequence: Synthetic epitope
SRAFSLASAD

SEQ ID NO: 47296 - protein, 10 aa, Artificial Sequence
  Description of Artificial Sequence: Synthetic epitope
SRAGLDNYWG

SEQ ID NO: 47297 - protein, 10 aa, Artificial Sequence
  Description of Artificial Sequence: Synthetic epitope
SRAGLDNYWG

SEQ ID NO: 47298 - protein, 10 aa, Artificial Sequence
  Description of Artificial Sequence: Synthetic epitope
SRAGSSLQKK

SEQ ID NO: 47299 - protein, 10 aa, Artificial Sequence
  Description of Artificial Sequence: Synthetic epitope
SRAIDINSSD

SEQ ID NO: 47300 - protein, 10 aa, Artificial Sequence
  Description of Artificial Sequence: Synthetic epitope
SRAIYESRQQ

SEQ ID NO: 47301 - protein, 10 aa, Artificial Sequence
  Description of Artificial Sequence: Synthetic epitope
SRAKDAVSSG

SEQ ID NO: 47302 - protein, 10 aa, Artificial Sequence
  Description of Artificial Sequence: Synthetic epitope
SRAKISGQNS

SEQ ID NO: 47303 - protein, 10 aa, Artificial Sequence
  Description of Artificial Sequence: Synthetic epitope
SRALAFLRAK

SEQ ID NO: 47304 - protein, 10 aa, Artificial Sequence
  Description of Artificial Sequence: Synthetic epitope
SRALKAISKL

SEQ ID NO: 47305 - protein, 10 aa, Artificial Sequence
  Description of Artificial Sequence: Synthetic epitope
SRALSADQGS

SEQ ID NO: 47306 - protein, 10 aa, Artificial Sequence
  Description of Artificial Sequence: Synthetic epitope
SRAMKITTVN

SEQ ID NO: 47307 - protein, 10 aa, Artificial Sequence
  Description of Artificial Sequence: Synthetic epitope
SRANLAKSRA

SEQ ID NO: 47308 - protein, 10 aa, Artificial Sequence
  Description of Artificial Sequence: Synthetic epitope
SRANTSPDAR

SEQ ID NO: 47309 - protein, 10 aa, Artificial Sequence
  Description of Artificial Sequence: Synthetic epitope
SRAQAVASTS

SEQ ID NO: 47310 - protein, 10 aa, Artificial Sequence
  Description of Artificial Sequence: Synthetic epitope
SRAQNIRNRA

SEQ ID NO: 47311 - protein, 10 aa, Artificial Sequence
  Description of Artificial Sequence: Synthetic epitope
SRAQSFLQTE

SEQ ID NO: 47312 - protein, 10 aa, Artificial Sequence
  Description of Artificial Sequence: Synthetic epitope
SRARELMSQQ

SEQ ID NO: 47313 - protein, 10 aa, Artificial Sequence
  Description of Artificial Sequence: Synthetic epitope
SRARQKVKGP

SEQ ID NO: 47314 - protein, 10 aa, Artificial Sequence
  Description of Artificial Sequence: Synthetic epitope
SRARRSLASP

SEQ ID NO: 47315 - protein, 10 aa, Artificial Sequence
  Description of Artificial Sequence: Synthetic epitope
SRASDTEAGK

SEQ ID NO: 47316 - protein, 10 aa, Artificial Sequence
  Description of Artificial Sequence: Synthetic epitope
SRASRKHKDE

SEQ ID NO: 47317 - protein, 10 aa, Artificial Sequence
  Description of Artificial Sequence: Synthetic epitope
SRASRLNLFF

SEQ ID NO: 47318 - protein, 10 aa, Artificial Sequence
  Description of Artificial Sequence: Synthetic epitope
SRASRVRADE

SEQ ID NO: 47319 - protein, 10 aa, Artificial Sequence
  Description of Artificial Sequence: Synthetic epitope
SRASTASASA

SEQ ID NO: 47320 - protein, 10 aa, Artificial Sequence
  Description of Artificial Sequence: Synthetic epitope
SRAVQAAESV

SEQ ID NO: 47321 - protein, 10 aa, Artificial Sequence
  Description of Artificial Sequence: Synthetic epitope
SRAVQSREHT

SEQ ID NO: 47322 - protein, 10 aa, Artificial Sequence
  Description of Artificial Sequence: Synthetic epitope
SRDKRLALVD

SEQ ID NO: 47323 - protein, 10 aa, Artificial Sequence
  Description of Artificial Sequence: Synthetic epitope
SRDMTSVLKQ

SEQ ID NO: 47324 - protein, 10 aa, Artificial Sequence
  Description of Artificial Sequence: Synthetic epitope
SRDNRKTVRA

SEQ ID NO: 47325 - protein, 10 aa, Artificial Sequence
  Description of Artificial Sequence: Synthetic epitope
SRDQSYQFKT

SEQ ID NO: 47326 - protein, 10 aa, Artificial Sequence
  Description of Artificial Sequence: Synthetic epitope
SRDRLSASSL

SEQ ID NO: 47327 - protein, 10 aa, Artificial Sequence
  Description of Artificial Sequence: Synthetic epitope
SRDRRTNRAS

SEQ ID NO: 47328 - protein, 10 aa, Artificial Sequence
  Description of Artificial Sequence: Synthetic epitope
SRDRYNSDND

SEQ ID NO: 47329 - protein, 10 aa, Artificial Sequence
  Description of Artificial Sequence: Synthetic epitope
SRDSKILKGD

SEQ ID NO: 47330 - protein, 10 aa, Artificial Sequence
  Description of Artificial Sequence: Synthetic epitope
SRDSLDVREK

SEQ ID NO: 47331 - protein, 10 aa, Artificial Sequence
  Description of Artificial Sequence: Synthetic epitope
SRDSSAGSDT

SEQ ID NO: 47332 - protein, 10 aa, Artificial Sequence
  Description of Artificial Sequence: Synthetic epitope
SRDSSVLDGT

SEQ ID NO: 47333 - protein, 10 aa, Artificial Sequence
  Description of Artificial Sequence: Synthetic epitope
SRDTSTIGQE

SEQ ID NO: 47334 - protein, 10 aa, Artificial Sequence
  Description of Artificial Sequence: Synthetic epitope
SRDVDSEISD

SEQ ID NO: 47335 - protein, 10 aa, Artificial Sequence
  Description of Artificial Sequence: Synthetic epitope
SRDVEEKPAH

SEQ ID NO: 47336 - protein, 10 aa, Artificial Sequence
  Description of Artificial Sequence: Synthetic epitope
SREADNVKDK

SEQ ID NO: 47337 - protein, 10 aa, Artificial Sequence
  Description of Artificial Sequence: Synthetic epitope
SREALAEAAL

SEQ ID NO: 47338 - protein, 10 aa, Artificial Sequence
  Description of Artificial Sequence: Synthetic epitope
SREDSSQLML

SEQ ID NO: 47339 - protein, 10 aa, Artificial Sequence
  Description of Artificial Sequence: Synthetic epitope
SREEHENRHM

SEQ ID NO: 47340 - protein, 10 aa, Artificial Sequence
  Description of Artificial Sequence: Synthetic epitope
SREEKKESLR

SEQ ID NO: 47341 - protein, 10 aa, Artificial Sequence
  Description of Artificial Sequence: Synthetic epitope
SREGEEKEQQ

SEQ ID NO: 47342 - protein, 10 aa, Artificial Sequence
  Description of Artificial Sequence: Synthetic epitope
SREGKVALSI

SEQ ID NO: 47343 - protein, 10 aa, Artificial Sequence
  Description of Artificial Sequence: Synthetic epitope
SREHMIPEHQ

SEQ ID NO: 47344 - protein, 10 aa, Artificial Sequence
  Description of Artificial Sequence: Synthetic epitope
SREISLKEFG

SEQ ID NO: 47345 - protein, 10 aa, Artificial Sequence
  Description of Artificial Sequence: Synthetic epitope
SREITKMQIM

SEQ ID NO: 47346 - protein, 10 aa, Artificial Sequence
  Description of Artificial Sequence: Synthetic epitope
SREIVISERL

SEQ ID NO: 47347 - protein, 10 aa, Artificial Sequence
  Description of Artificial Sequence: Synthetic epitope
SREKAMADEE

SEQ ID NO: 47348 - protein, 10 aa, Artificial Sequence
  Description of Artificial Sequence: Synthetic epitope
SREKTDSLTT

SEQ ID NO: 47349 - protein, 10 aa, Artificial Sequence
  Description of Artificial Sequence: Synthetic epitope
SRELGRAAGA

SEQ ID NO: 47350 - protein, 10 aa, Artificial Sequence
  Description of Artificial Sequence: Synthetic epitope
SRELNNSTNG

SEQ ID NO: 47351 - protein, 10 aa, Artificial Sequence
  Description of Artificial Sequence: Synthetic epitope
SREMLVEING

SEQ ID NO: 47352 - protein, 10 aa, Artificial Sequence
  Description of Artificial Sequence: Synthetic epitope
SRENGQKFNA

SEQ ID NO: 47353 - protein, 10 aa, Artificial Sequence
  Description of Artificial Sequence: Synthetic epitope
SREQSQMKER

SEQ ID NO: 47354 - protein, 10 aa, Artificial Sequence
  Description of Artificial Sequence: Synthetic epitope
SREQSRSASA

SEQ ID NO: 47355 - protein, 10 aa, Artificial Sequence
  Description of Artificial Sequence: Synthetic epitope
SRERAESEAE

SEQ ID NO: 47356 - protein, 10 aa, Artificial Sequence
  Description of Artificial Sequence: Synthetic epitope
SRERSPQRKR

SEQ ID NO: 47357 - protein, 10 aa, Artificial Sequence
  Description of Artificial Sequence: Synthetic epitope
SRESLQTRTS

SEQ ID NO: 47358 - protein, 10 aa, Artificial Sequence
  Description of Artificial Sequence: Synthetic epitope
SREVDRMVST

SEQ ID NO: 47359 - protein, 10 aa, Artificial Sequence
  Description of Artificial Sequence: Synthetic epitope
SRFQVQTVLQ

SEQ ID NO: 47360 - protein, 10 aa, Artificial Sequence
  Description of Artificial Sequence: Synthetic epitope
SRFRLTEREE

SEQ ID NO: 47361 - protein, 10 aa, Artificial Sequence
  Description of Artificial Sequence: Synthetic epitope
SRFVISAKEQ

SEQ ID NO: 47362 - protein, 10 aa, Artificial Sequence
  Description of Artificial Sequence: Synthetic epitope
SRGFRSEVDM

SEQ ID NO: 47363 - protein, 10 aa, Artificial Sequence
  Description of Artificial Sequence: Synthetic epitope
SRGKKYALEK

SEQ ID NO: 47364 - protein, 10 aa, Artificial Sequence
  Description of Artificial Sequence: Synthetic epitope
SRGKLVQVNS

SEQ ID NO: 47365 - protein, 10 aa, Artificial Sequence
  Description of Artificial Sequence: Synthetic epitope
SRGKQARGKS

SEQ ID NO: 47366 - protein, 10 aa, Artificial Sequence
  Description of Artificial Sequence: Synthetic epitope
SRGKVSKDDR

SEQ ID NO: 47367 - protein, 10 aa, Artificial Sequence
  Description of Artificial Sequence: Synthetic epitope
SRGMKFAEEQ

SEQ ID NO: 47368 - protein, 10 aa, Artificial Sequence
  Description of Artificial Sequence: Synthetic epitope
SRGMKLAEIK

SEQ ID NO: 47369 - protein, 10 aa, Artificial Sequence
  Description of Artificial Sequence: Synthetic epitope
SRGQAKLEQR

SEQ ID NO: 47370 - protein, 10 aa, Artificial Sequence
  Description of Artificial Sequence: Synthetic epitope
SRGQSTVGTE

SEQ ID NO: 47371 - protein, 10 aa, Artificial Sequence
  Description of Artificial Sequence: Synthetic epitope
SRGSNLNSSG

SEQ ID NO: 47372 - protein, 10 aa, Artificial Sequence
  Description of Artificial Sequence: Synthetic epitope
SRGTVIIDNK

SEQ ID NO: 47373 - protein, 10 aa, Artificial Sequence
  Description of Artificial Sequence: Synthetic epitope
SRHERQELKY

SEQ ID NO: 47374 - protein, 10 aa, Artificial Sequence
  Description of Artificial Sequence: Synthetic epitope
SRHSGAAKTR

SEQ ID NO: 47375 - protein, 10 aa, Artificial Sequence
  Description of Artificial Sequence: Synthetic epitope
SRHVRASSLR

SEQ ID NO: 47376 - protein, 10 aa, Artificial Sequence
  Description of Artificial Sequence: Synthetic epitope
SRIDHVKPKV

SEQ ID NO: 47377 - protein, 10 aa, Artificial Sequence
  Description of Artificial Sequence: Synthetic epitope
SRIEESIDRV

SEQ ID NO: 47378 - protein, 10 aa, Artificial Sequence
  Description of Artificial Sequence: Synthetic epitope
SRIESEAKKL

SEQ ID NO: 47379 - protein, 10 aa, Artificial Sequence
  Description of Artificial Sequence: Synthetic epitope
SRIHREEDFQ

SEQ ID NO: 47380 - protein, 10 aa, Artificial Sequence
  Description of Artificial Sequence: Synthetic epitope
SRIHRTSSTL

SEQ ID NO: 47381 - protein, 10 aa, Artificial Sequence
  Description of Artificial Sequence: Synthetic epitope
SRIIGVYATK

SEQ ID NO: 47382 - protein, 10 aa, Artificial Sequence
  Description of Artificial Sequence: Synthetic epitope
SRIIQEVEEN

SEQ ID NO: 47383 - protein, 10 aa, Artificial Sequence
  Description of Artificial Sequence: Synthetic epitope
SRIKNKIAEL

SEQ ID NO: 47384 - protein, 10 aa, Artificial Sequence
  Description of Artificial Sequence: Synthetic epitope
SRIKSTLNSV

SEQ ID NO: 47385 - protein, 10 aa, Artificial Sequence
  Description of Artificial Sequence: Synthetic epitope
SRILMTATQE

SEQ ID NO: 47386 - protein, 10 aa, Artificial Sequence
  Description of Artificial Sequence: Synthetic epitope
SRILSIQKDL

SEQ ID NO: 47387 - protein, 10 aa, Artificial Sequence
  Description of Artificial Sequence: Synthetic epitope
SRIQRLMAEG

SEQ ID NO: 47388 - protein, 10 aa, Artificial Sequence
  Description of Artificial Sequence: Synthetic epitope
SRIQTSLTSA

SEQ ID NO: 47389 - protein, 10 aa, Artificial Sequence
  Description of Artificial Sequence: Synthetic epitope
SRIRNRKEKK

SEQ ID NO: 47390 - protein, 10 aa, Artificial Sequence
  Description of Artificial Sequence: Synthetic epitope
SRISSNSFVQ

SEQ ID NO: 47391 - protein, 10 aa, Artificial Sequence
  Description of Artificial Sequence: Synthetic epitope
SRITEMQQVE

SEQ ID NO: 47392 - protein, 10 aa, Artificial Sequence
  Description of Artificial Sequence: Synthetic epitope
SRITPTTFLS

SEQ ID NO: 47393 - protein, 10 aa, Artificial Sequence
  Description of Artificial Sequence: Synthetic epitope
SRIVDDLKDE

SEQ ID NO: 47394 - protein, 10 aa, Artificial Sequence
  Description of Artificial Sequence: Synthetic epitope
SRIVEQENAI

SEQ ID NO: 47395 - protein, 10 aa, Artificial Sequence
  Description of Artificial Sequence: Synthetic epitope
SRIVSSASTD

SEQ ID NO: 47396 - protein, 10 aa, Artificial Sequence
  Description of Artificial Sequence: Synthetic epitope
SRKAKEEGTE

SEQ ID NO: 47397 - protein, 10 aa, Artificial Sequence
  Description of Artificial Sequence: Synthetic epitope
SRKAVAQAPG

SEQ ID NO: 47398 - protein, 10 aa, Artificial Sequence
  Description of Artificial Sequence: Synthetic epitope
SRKDGEASSR

SEQ ID NO: 47399 - protein, 10 aa, Artificial Sequence
  Description of Artificial Sequence: Synthetic epitope
SRKDRDSKAH

SEQ ID NO: 47400 - protein, 10 aa, Artificial Sequence
  Description of Artificial Sequence: Synthetic epitope
SRKDTSVKIK

SEQ ID NO: 47401 - protein, 10 aa, Artificial Sequence
  Description of Artificial Sequence: Synthetic epitope
SRKEKDERIL

SEQ ID NO: 47402 - protein, 10 aa, Artificial Sequence
  Description of Artificial Sequence: Synthetic epitope
SRKISTHMSS

SEQ ID NO: 47403 - protein, 10 aa, Artificial Sequence
  Description of Artificial Sequence: Synthetic epitope
SRKKAQRHSK

SEQ ID NO: 47404 - protein, 10 aa, Artificial Sequence
  Description of Artificial Sequence: Synthetic epitope
SRKKEAKAEE

SEQ ID NO: 47405 - protein, 10 aa, Artificial Sequence
  Description of Artificial Sequence: Synthetic epitope
SRKKGQDRSE

SEQ ID NO: 47406 - protein, 10 aa, Artificial Sequence
  Description of Artificial Sequence: Synthetic epitope
SRKKNITSKT

SEQ ID NO: 47407 - protein, 10 aa, Artificial Sequence
  Description of Artificial Sequence: Synthetic epitope
SRKKREITEK

SEQ ID NO: 47408 - protein, 10 aa, Artificial Sequence
  Description of Artificial Sequence: Synthetic epitope
SRKKSARFKS

SEQ ID NO: 47409 - protein, 10 aa, Artificial Sequence
  Description of Artificial Sequence: Synthetic epitope
SRKNTPHFNR

SEQ ID NO: 47410 - protein, 10 aa, Artificial Sequence
  Description of Artificial Sequence: Synthetic epitope
SRKPEAMDEP

SEQ ID NO: 47411 - protein, 10 aa, Artificial Sequence
  Description of Artificial Sequence: Synthetic epitope
SRKPILAQHQ

SEQ ID NO: 47412 - protein, 10 aa, Artificial Sequence
  Description of Artificial Sequence: Synthetic epitope
SRKRSSISKQ

SEQ ID NO: 47413 - protein, 10 aa, Artificial Sequence
  Description of Artificial Sequence: Synthetic epitope
SRKSARPTKL

SEQ ID NO: 47414 - protein, 10 aa, Artificial Sequence
  Description of Artificial Sequence: Synthetic epitope
SRKSHHETHK

SEQ ID NO: 47415 - protein, 10 aa, Artificial Sequence
  Description of Artificial Sequence: Synthetic epitope
SRKSIMTSAE

SEQ ID NO: 47416 - protein, 10 aa, Artificial Sequence
  Description of Artificial Sequence: Synthetic epitope
SRKSKQHQSS

SEQ ID NO: 47417 - protein, 10 aa, Artificial Sequence
  Description of Artificial Sequence: Synthetic epitope
SRKSSAGGAK

SEQ ID NO: 47418 - protein, 10 aa, Artificial Sequence
  Description of Artificial Sequence: Synthetic epitope
SRKSSKQVSQ

SEQ ID NO: 47419 - protein, 10 aa, Artificial Sequence
  Description of Artificial Sequence: Synthetic epitope
SRKSSLAAQA

SEQ ID NO: 47420 - protein, 10 aa, Artificial Sequence
  Description of Artificial Sequence: Synthetic epitope
SRKSTKKTNQ

SEQ ID NO: 47421 - protein, 10 aa, Artificial Sequence
  Description of Artificial Sequence: Synthetic epitope
SRKSTSQTGN

SEQ ID NO: 47422 - protein, 10 aa, Artificial Sequence
  Description of Artificial Sequence: Synthetic epitope
SRKSVMVAEI

SEQ ID NO: 47423 - protein, 10 aa, Artificial Sequence
  Description of Artificial Sequence: Synthetic epitope
SRKTARKSTR

SEQ ID NO: 47424 - protein, 10 aa, Artificial Sequence
  Description of Artificial Sequence: Synthetic epitope
SRKTTKKQAK

SEQ ID NO: 47425 - protein, 10 aa, Artificial Sequence
  Description of Artificial Sequence: Synthetic epitope
SRKVESLSQE

SEQ ID NO: 47426 - protein, 10 aa, Artificial Sequence
  Description of Artificial Sequence: Synthetic epitope
SRKVKLQSKV

SEQ ID NO: 47427 - protein, 10 aa, Artificial Sequence
  Description of Artificial Sequence: Synthetic epitope
SRLAEQAAQL

SEQ ID NO: 47428 - protein, 10 aa, Artificial Sequence
  Description of Artificial Sequence: Synthetic epitope
SRLATDLRAQ

SEQ ID NO: 47429 - protein, 10 aa, Artificial Sequence
  Description of Artificial Sequence: Synthetic epitope
SRLDAHKVLS

SEQ ID NO: 47430 - protein, 10 aa, Artificial Sequence
  Description of Artificial Sequence: Synthetic epitope
SRLDKGLAAL

SEQ ID NO: 47431 - protein, 10 aa, Artificial Sequence
  Description of Artificial Sequence: Synthetic epitope
SRLDLNVTQA

SEQ ID NO: 47432 - protein, 10 aa, Artificial Sequence
  Description of Artificial Sequence: Synthetic epitope
SRLDRYKIAR

SEQ ID NO: 47433 - protein, 10 aa, Artificial Sequence
  Description of Artificial Sequence: Synthetic epitope
SRLEEIAEEG

SEQ ID NO: 47434 - protein, 10 aa, Artificial Sequence
  Description of Artificial Sequence: Synthetic epitope
SRLEELAKKH

SEQ ID NO: 47435 - protein, 10 aa, Artificial Sequence
  Description of Artificial Sequence: Synthetic epitope
SRLEKLKVSR

SEQ ID NO: 47436 - protein, 10 aa, Artificial Sequence
  Description of Artificial Sequence: Synthetic epitope
SRLESEVGHW

SEQ ID NO: 47437 - protein, 10 aa, Artificial Sequence
  Description of Artificial Sequence: Synthetic epitope
SRLFRSRSLR

SEQ ID NO: 47438 - protein, 10 aa, Artificial Sequence
  Description of Artificial Sequence: Synthetic epitope
SRLIAASSRP

SEQ ID NO: 47439 - protein, 10 aa, Artificial Sequence
  Description of Artificial Sequence: Synthetic epitope
SRLIAQASEK

SEQ ID NO: 47440 - protein, 10 aa, Artificial Sequence
  Description of Artificial Sequence: Synthetic epitope
SRLIEKASVN

SEQ ID NO: 47441 - protein, 10 aa, Artificial Sequence
  Description of Artificial Sequence: Synthetic epitope
SRLIKLKQQN

SEQ ID NO: 47442 - protein, 10 aa, Artificial Sequence
  Description of Artificial Sequence: Synthetic epitope
SRLKDSSEDS

SEQ ID NO: 47443 - protein, 10 aa, Artificial Sequence
  Description of Artificial Sequence: Synthetic epitope
SRLLELQEEK

SEQ ID NO: 47444 - protein, 10 aa, Artificial Sequence
  Description of Artificial Sequence: Synthetic epitope
SRLMKNASYN

SEQ ID NO: 47445 - protein, 10 aa, Artificial Sequence
  Description of Artificial Sequence: Synthetic epitope
SRLMSKESGS

SEQ ID NO: 47446 - protein, 10 aa, Artificial Sequence
  Description of Artificial Sequence: Synthetic epitope
SRLNETTETQ

SEQ ID NO: 47447 - protein, 10 aa, Artificial Sequence
  Description of Artificial Sequence: Synthetic epitope
SRLQKISEEY

SEQ ID NO: 47448 - protein, 10 aa, Artificial Sequence
  Description of Artificial Sequence: Synthetic epitope
SRLQTVTAQV

SEQ ID NO: 47449 - protein, 10 aa, Artificial Sequence
  Description of Artificial Sequence: Synthetic epitope
SRLRDTRRLS

SEQ ID NO: 47450 - protein, 10 aa, Artificial Sequence
  Description of Artificial Sequence: Synthetic epitope
SRLSGTLKSQ

SEQ ID NO: 47451 - protein, 10 aa, Artificial Sequence
  Description of Artificial Sequence: Synthetic epitope
SRLSRARQNL

SEQ ID NO: 47452 - protein, 10 aa, Artificial Sequence
  Description of Artificial Sequence: Synthetic epitope
SRLSRQMVPQ

SEQ ID NO: 47453 - protein, 10 aa, Artificial Sequence
  Description of Artificial Sequence: Synthetic epitope
SRLSSLHLHE

SEQ ID NO: 47454 - protein, 10 aa, Artificial Sequence
  Description of Artificial Sequence: Synthetic epitope
SRLSTGASAD

SEQ ID NO: 47455 - protein, 10 aa, Artificial Sequence
  Description of Artificial Sequence: Synthetic epitope
SRLSTLKSHM

SEQ ID NO: 47456 - protein, 10 aa, Artificial Sequence
  Description of Artificial Sequence: Synthetic epitope
SRLSTSTTIE

SEQ ID NO: 47457 - protein, 10 aa, Artificial Sequence
  Description of Artificial Sequence: Synthetic epitope
SRLTELSLRR

SEQ ID NO: 47458 - protein, 10 aa, Artificial Sequence
  Description of Artificial Sequence: Synthetic epitope
SRLTSAIKPE

SEQ ID NO: 47459 - protein, 10 aa, Artificial Sequence
  Description of Artificial Sequence: Synthetic epitope
SRLTSRLGNQ

SEQ ID NO: 47460 - protein, 10 aa, Artificial Sequence
  Description of Artificial Sequence: Synthetic epitope
SRLTSRSSQE

SEQ ID NO: 47461 - protein, 10 aa, Artificial Sequence
  Description of Artificial Sequence: Synthetic epitope
SRLVALREQK

SEQ ID NO: 47462 - protein, 10 aa, Artificial Sequence
  Description of Artificial Sequence: Synthetic epitope
SRMEDATNVV

SEQ ID NO: 47463 - protein, 10 aa, Artificial Sequence
  Description of Artificial Sequence: Synthetic epitope
SRMKNSQSGV

SEQ ID NO: 47464 - protein, 10 aa, Artificial Sequence
  Description of Artificial Sequence: Synthetic epitope
SRMKPYARME

SEQ ID NO: 47465 - protein, 10 aa, Artificial Sequence
  Description of Artificial Sequence: Synthetic epitope
SRMQLSAELQ

SEQ ID NO: 47466 - protein, 10 aa, Artificial Sequence
  Description of Artificial Sequence: Synthetic epitope
SRMQPKIQKD

SEQ ID NO: 47467 - protein, 10 aa, Artificial Sequence
  Description of Artificial Sequence: Synthetic epitope
SRMRMRRQEN

SEQ ID NO: 47468 - protein, 10 aa, Artificial Sequence
  Description of Artificial Sequence: Synthetic epitope
SRMSTKTTSI

SEQ ID NO: 47469 - protein, 10 aa, Artificial Sequence
  Description of Artificial Sequence: Synthetic epitope
SRMVLRATEA

SEQ ID NO: 47470 - protein, 10 aa, Artificial Sequence
  Description of Artificial Sequence: Synthetic epitope
SRMVRRTFAS

SEQ ID NO: 47471 - protein, 10 aa, Artificial Sequence
  Description of Artificial Sequence: Synthetic epitope
SRNAGKRSRS

SEQ ID NO: 47472 - protein, 10 aa, Artificial Sequence
  Description of Artificial Sequence: Synthetic epitope
SRNILYTRSE

SEQ ID NO: 47473 - protein, 10 aa, Artificial Sequence
  Description of Artificial Sequence: Synthetic epitope
SRNISLALED

SEQ ID NO: 47474 - protein, 10 aa, Artificial Sequence
  Description of Artificial Sequence: Synthetic epitope
SRNISNIAGG

SEQ ID NO: 47475 - protein, 10 aa, Artificial Sequence
  Description of Artificial Sequence: Synthetic epitope
SRNLLKKNNS

SEQ ID NO: 47476 - protein, 10 aa, Artificial Sequence
  Description of Artificial Sequence: Synthetic epitope
SRNMNRSEKN

SEQ ID NO: 47477 - protein, 10 aa, Artificial Sequence
  Description of Artificial Sequence: Synthetic epitope
SRNPKVLNPR

SEQ ID NO: 47478 - protein, 10 aa, Artificial Sequence
  Description of Artificial Sequence: Synthetic epitope
SRNQKPKKRK

SEQ ID NO: 47479 - protein, 10 aa, Artificial Sequence
  Description of Artificial Sequence: Synthetic epitope
SRNSASATTP

SEQ ID NO: 47480 - protein, 10 aa, Artificial Sequence
  Description of Artificial Sequence: Synthetic epitope
SRNSGRSKSV

SEQ ID NO: 47481 - protein, 10 aa, Artificial Sequence
  Description of Artificial Sequence: Synthetic epitope
SRNSNTVVFV

SEQ ID NO: 47482 - protein, 10 aa, Artificial Sequence
  Description of Artificial Sequence: Synthetic epitope
SRPAAMISQP

SEQ ID NO: 47483 - protein, 10 aa, Artificial Sequence
  Description of Artificial Sequence: Synthetic epitope
SRPHAREVKH

SEQ ID NO: 47484 - protein, 10 aa, Artificial Sequence
  Description of Artificial Sequence: Synthetic epitope
SRPLLVGSRM

SEQ ID NO: 47485 - protein, 10 aa, Artificial Sequence
  Description of Artificial Sequence: Synthetic epitope
SRPNQASSEG

SEQ ID NO: 47486 - protein, 10 aa, Artificial Sequence
  Description of Artificial Sequence: Synthetic epitope
SRPRDIHTIK

SEQ ID NO: 47487 - protein, 10 aa, Artificial Sequence
  Description of Artificial Sequence: Synthetic epitope
SRPTKSKDAH

SEQ ID NO: 47488 - protein, 10 aa, Artificial Sequence
  Description of Artificial Sequence: Synthetic epitope
SRPVAAKAKQ

SEQ ID NO: 47489 - protein, 10 aa, Artificial Sequence
  Description of Artificial Sequence: Synthetic epitope
SRPVTALDNE

SEQ ID NO: 47490 - protein, 10 aa, Artificial Sequence
  Description of Artificial Sequence: Synthetic epitope
SRQAEATARA

SEQ ID NO: 47491 - protein, 10 aa, Artificial Sequence
  Description of Artificial Sequence: Synthetic epitope
SRQAQKVATP

SEQ ID NO: 47492 - protein, 10 aa, Artificial Sequence
  Description of Artificial Sequence: Synthetic epitope
SRQISQEMGS

SEQ ID NO: 47493 - protein, 10 aa, Artificial Sequence
  Description of Artificial Sequence: Synthetic epitope
SRQKNAYTDY

SEQ ID NO: 47494 - protein, 10 aa, Artificial Sequence
  Description of Artificial Sequence: Synthetic epitope
SRQNSVRRAS

SEQ ID NO: 47495 - protein, 10 aa, Artificial Sequence
  Description of Artificial Sequence: Synthetic epitope
SRQQTALVRN

SEQ ID NO: 47496 - protein, 10 aa, Artificial Sequence
  Description of Artificial Sequence: Synthetic epitope
SRQQYSSDHS

SEQ ID NO: 47497 - protein, 10 aa, Artificial Sequence
  Description of Artificial Sequence: Synthetic epitope
SRQRIASQEL

SEQ ID NO: 47498 - protein, 10 aa, Artificial Sequence
  Description of Artificial Sequence: Synthetic epitope
SRQSQQTSSL

SEQ ID NO: 47499 - protein, 10 aa, Artificial Sequence
  Description of Artificial Sequence: Synthetic epitope
SRQSSLSEKK

SEQ ID NO: 47500 - protein, 10 aa, Artificial Sequence
  Description of Artificial Sequence: Synthetic epitope
SRQSSVTEST

SEQ ID NO: 47501 - protein, 10 aa, Artificial Sequence
  Description of Artificial Sequence: Synthetic epitope
SRQTLEESQS

SEQ ID NO: 47502 - protein, 10 aa, Artificial Sequence
  Description of Artificial Sequence: Synthetic epitope
SRQVGKNSSL

SEQ ID NO: 47503 - protein, 10 aa, Artificial Sequence
  Description of Artificial Sequence: Synthetic epitope
SRRAARVAPA

SEQ ID NO: 47504 - protein, 10 aa, Artificial Sequence
  Description of Artificial Sequence: Synthetic epitope
SRRAENARSA

SEQ ID NO: 47505 - protein, 10 aa, Artificial Sequence
  Description of Artificial Sequence: Synthetic epitope
SRRKMAGGKK

SEQ ID NO: 47506 - protein, 10 aa, Artificial Sequence
  Description of Artificial Sequence: Synthetic epitope
SRRKQRKPQQ

SEQ ID NO: 47507 - protein, 10 aa, Artificial Sequence
  Description of Artificial Sequence: Synthetic epitope
SRRLALLQEQ

SEQ ID NO: 47508 - protein, 10 aa, Artificial Sequence
  Description of Artificial Sequence: Synthetic epitope
SRRMAASNIS

SEQ ID NO: 47509 - protein, 10 aa, Artificial Sequence
  Description of Artificial Sequence: Synthetic epitope
SRRNLQSLSK

SEQ ID NO: 47510 - protein, 10 aa, Artificial Sequence
  Description of Artificial Sequence: Synthetic epitope
SRRSDAVDSH

SEQ ID NO: 47511 - protein, 10 aa, Artificial Sequence
  Description of Artificial Sequence: Synthetic epitope
SRRSKSATLG

SEQ ID NO: 47512 - protein, 10 aa, Artificial Sequence
  Description of Artificial Sequence: Synthetic epitope
SRRSQHTDDS

SEQ ID NO: 47513 - protein, 10 aa, Artificial Sequence
  Description of Artificial Sequence: Synthetic epitope
SRRSRRNTSA

SEQ ID NO: 47514 - protein, 10 aa, Artificial Sequence
  Description of Artificial Sequence: Synthetic epitope
SRRSRSSYTH

SEQ ID NO: 47515 - protein, 10 aa, Artificial Sequence
  Description of Artificial Sequence: Synthetic epitope
SRRSSVAQED

SEQ ID NO: 47516 - protein, 10 aa, Artificial Sequence
  Description of Artificial Sequence: Synthetic epitope
SRRSTSTTGK

SEQ ID NO: 47517 - protein, 10 aa, Artificial Sequence
  Description of Artificial Sequence: Synthetic epitope
SRRTAQVRYL

SEQ ID NO: 47518 - protein, 10 aa, Artificial Sequence
  Description of Artificial Sequence: Synthetic epitope
SRRTRAEMGG

SEQ ID NO: 47519 - protein, 10 aa, Artificial Sequence
  Description of Artificial Sequence: Synthetic epitope
SRRTVAKGNL

SEQ ID NO: 47520 - protein, 10 aa, Artificial Sequence
  Description of Artificial Sequence: Synthetic epitope
SRRTYLQSEE

SEQ ID NO: 47521 - protein, 10 aa, Artificial Sequence
  Description of Artificial Sequence: Synthetic epitope
SRRVEGKAQN

SEQ ID NO: 47522 - protein, 10 aa, Artificial Sequence
  Description of Artificial Sequence: Synthetic epitope
SRRVTALLKV

SEQ ID NO: 47523 - protein, 10 aa, Artificial Sequence
  Description of Artificial Sequence: Synthetic epitope
SRSAAVSEQQ

SEQ ID NO: 47524 - protein, 10 aa, Artificial Sequence
  Description of Artificial Sequence: Synthetic epitope
SRSAGAGAKS

SEQ ID NO: 47525 - protein, 10 aa, Artificial Sequence
  Description of Artificial Sequence: Synthetic epitope
SRSANLLKES

SEQ ID NO: 47526 - protein, 10 aa, Artificial Sequence
  Description of Artificial Sequence: Synthetic epitope
SRSASNRLKA

SEQ ID NO: 47527 - protein, 10 aa, Artificial Sequence
  Description of Artificial Sequence: Synthetic epitope
SRSASSDTIE

SEQ ID NO: 47528 - protein, 10 aa, Artificial Sequence
  Description of Artificial Sequence: Synthetic epitope
SRSDLSLIQQ

SEQ ID NO: 47529 - protein, 10 aa, Artificial Sequence
  Description of Artificial Sequence: Synthetic epitope
SRSDQASISL

SEQ ID NO: 47530 - protein, 10 aa, Artificial Sequence
  Description of Artificial Sequence: Synthetic epitope
SRSELNQVDQ

SEQ ID NO: 47531 - protein, 10 aa, Artificial Sequence
  Description of Artificial Sequence: Synthetic epitope
SRSENEKKSE

SEQ ID NO: 47532 - protein, 10 aa, Artificial Sequence
  Description of Artificial Sequence: Synthetic epitope
SRSESLDDGS

SEQ ID NO: 47533 - protein, 10 aa, Artificial Sequence
  Description of Artificial Sequence: Synthetic epitope
SRSFKETTNR

SEQ ID NO: 47534 - protein, 10 aa, Artificial Sequence
  Description of Artificial Sequence: Synthetic epitope
SRSFLSRSNM

SEQ ID NO: 47535 - protein, 10 aa, Artificial Sequence
  Description of Artificial Sequence: Synthetic epitope
SRSFQVTKEI

SEQ ID NO: 47536 - protein, 10 aa, Artificial Sequence
  Description of Artificial Sequence: Synthetic epitope
SRSGRRTDVN

SEQ ID NO: 47537 - protein, 10 aa, Artificial Sequence
  Description of Artificial Sequence: Synthetic epitope
SRSGSQRQGS

SEQ ID NO: 47538 - protein, 10 aa, Artificial Sequence
  Description of Artificial Sequence: Synthetic epitope
SRSIKKRLSI

SEQ ID NO: 47539 - protein, 10 aa, Artificial Sequence
  Description of Artificial Sequence: Synthetic epitope
SRSISSDEVK

SEQ ID NO: 47540 - protein, 10 aa, Artificial Sequence
  Description of Artificial Sequence: Synthetic epitope
SRSKAPSKHV

SEQ ID NO: 47541 - protein, 10 aa, Artificial Sequence
  Description of Artificial Sequence: Synthetic epitope
SRSKDETRVS

SEQ ID NO: 47542 - protein, 10 aa, Artificial Sequence
  Description of Artificial Sequence: Synthetic epitope
SRSKLMAPPR

SEQ ID NO: 47543 - protein, 10 aa, Artificial Sequence
  Description of Artificial Sequence: Synthetic epitope
SRSKSAERER

SEQ ID NO: 47544 - protein, 10 aa, Artificial Sequence
  Description of Artificial Sequence: Synthetic epitope
SRSKSRGLSR

SEQ ID NO: 47545 - protein, 10 aa, Artificial Sequence
  Description of Artificial Sequence: Synthetic epitope
SRSKVAGSPS

SEQ ID NO: 47546 - protein, 10 aa, Artificial Sequence
  Description of Artificial Sequence: Synthetic epitope
SRSLRLSQEI

SEQ ID NO: 47547 - protein, 10 aa, Artificial Sequence
  Description of Artificial Sequence: Synthetic epitope
SRSLTSRPST

SEQ ID NO: 47548 - protein, 10 aa, Artificial Sequence
  Description of Artificial Sequence: Synthetic epitope
SRSLVNSSDK

SEQ ID NO: 47549 - protein, 10 aa, Artificial Sequence
  Description of Artificial Sequence: Synthetic epitope
SRSMSQEAQR

SEQ ID NO: 47550 - protein, 10 aa, Artificial Sequence
  Description of Artificial Sequence: Synthetic epitope
SRSNRQKEYK

SEQ ID NO: 47551 - protein, 10 aa, Artificial Sequence
  Description of Artificial Sequence: Synthetic epitope
SRSNSKSKPN

SEQ ID NO: 47552 - protein, 10 aa, Artificial Sequence
  Description of Artificial Sequence: Synthetic epitope
SRSNVPSASE

SEQ ID NO: 47553 - protein, 10 aa, Artificial Sequence
  Description of Artificial Sequence: Synthetic epitope
SRSPKIDQKK

SEQ ID NO: 47554 - protein, 10 aa, Artificial Sequence
  Description of Artificial Sequence: Synthetic epitope
SRSQEEVSES

SEQ ID NO: 47555 - protein, 10 aa, Artificial Sequence
  Description of Artificial Sequence: Synthetic epitope
SRSQSKSRDH

SEQ ID NO: 47556 - protein, 10 aa, Artificial Sequence
  Description of Artificial Sequence: Synthetic epitope
SRSQSSTEDD

SEQ ID NO: 47557 - protein, 10 aa, Artificial Sequence
  Description of Artificial Sequence: Synthetic epitope
SRSQTQTLES

SEQ ID NO: 47558 - protein, 10 aa, Artificial Sequence
  Description of Artificial Sequence: Synthetic epitope
SRSRLPGSAT

SEQ ID NO: 47559 - protein, 10 aa, Artificial Sequence
  Description of Artificial Sequence: Synthetic epitope
SRSRQSKVEL

SEQ ID NO: 47560 - protein, 10 aa, Artificial Sequence
  Description of Artificial Sequence: Synthetic epitope
SRSRSASGEV

SEQ ID NO: 47561 - protein, 10 aa, Artificial Sequence
  Description of Artificial Sequence: Synthetic epitope
SRSRSKSRGR

SEQ ID NO: 47562 - protein, 10 aa, Artificial Sequence
  Description of Artificial Sequence: Synthetic epitope
SRSRSRDKER

SEQ ID NO: 47563 - protein, 10 aa, Artificial Sequence
  Description of Artificial Sequence: Synthetic epitope
SRSSAFISEA

SEQ ID NO: 47564 - protein, 10 aa, Artificial Sequence
  Description of Artificial Sequence: Synthetic epitope
SRSSAPMGIY

SEQ ID NO: 47565 - protein, 10 aa, Artificial Sequence
  Description of Artificial Sequence: Synthetic epitope
SRSSEDTKQM

SEQ ID NO: 47566 - protein, 10 aa, Artificial Sequence
  Description of Artificial Sequence: Synthetic epitope
SRSSEEREVK

SEQ ID NO: 47567 - protein, 10 aa, Artificial Sequence
  Description of Artificial Sequence: Synthetic epitope
SRSSKAHNQK

SEQ ID NO: 47568 - protein, 10 aa, Artificial Sequence
  Description of Artificial Sequence: Synthetic epitope
SRSSKSVAKL

SEQ ID NO: 47569 - protein, 10 aa, Artificial Sequence
  Description of Artificial Sequence: Synthetic epitope
SRSSNEATSP

SEQ ID NO: 47570 - protein, 10 aa, Artificial Sequence
  Description of Artificial Sequence: Synthetic epitope
SRSSTKAEIL

SEQ ID NO: 47571 - protein, 10 aa, Artificial Sequence
  Description of Artificial Sequence: Synthetic epitope
SRSSVLKSAL

SEQ ID NO: 47572 - protein, 10 aa, Artificial Sequence
  Description of Artificial Sequence: Synthetic epitope
SRSTAASPTN

SEQ ID NO: 47573 - protein, 10 aa, Artificial Sequence
  Description of Artificial Sequence: Synthetic epitope
SRSTLTELGD

SEQ ID NO: 47574 - protein, 10 aa, Artificial Sequence
  Description of Artificial Sequence: Synthetic epitope
SRSTMVTSSG

SEQ ID NO: 47575 - protein, 10 aa, Artificial Sequence
  Description of Artificial Sequence: Synthetic epitope
SRSTSRERRK

SEQ ID NO: 47576 - protein, 10 aa, Artificial Sequence
  Description of Artificial Sequence: Synthetic epitope
SRSTSVTSQI

SEQ ID NO: 47577 - protein, 10 aa, Artificial Sequence
  Description of Artificial Sequence: Synthetic epitope
SRSTVDSVNE

SEQ ID NO: 47578 - protein, 10 aa, Artificial Sequence
  Description of Artificial Sequence: Synthetic epitope
SRTAKAKPSK

SEQ ID NO: 47579 - protein, 10 aa, Artificial Sequence
  Description of Artificial Sequence: Synthetic epitope
SRTALSVGGA

SEQ ID NO: 47580 - protein, 10 aa, Artificial Sequence
  Description of Artificial Sequence: Synthetic epitope
SRTGISNMRA

SEQ ID NO: 47581 - protein, 10 aa, Artificial Sequence
  Description of Artificial Sequence: Synthetic epitope
SRTKAGQMSH

SEQ ID NO: 47582 - protein, 10 aa, Artificial Sequence
  Description of Artificial Sequence: Synthetic epitope
SRTKDYPEME

SEQ ID NO: 47583 - protein, 10 aa, Artificial Sequence
  Description of Artificial Sequence: Synthetic epitope
SRTKLHNESK

SEQ ID NO: 47584 - protein, 10 aa, Artificial Sequence
  Description of Artificial Sequence: Synthetic epitope
SRTKTQPGQL

SEQ ID NO: 47585 - protein, 10 aa, Artificial Sequence
  Description of Artificial Sequence: Synthetic epitope
SRTKTSKLVE

SEQ ID NO: 47586 - protein, 10 aa, Artificial Sequence
  Description of Artificial Sequence: Synthetic epitope
SRTLTLETDQ

SEQ ID NO: 47587 - protein, 10 aa, Artificial Sequence
  Description of Artificial Sequence: Synthetic epitope
SRTPLLSMST

SEQ ID NO: 47588 - protein, 10 aa, Artificial Sequence
  Description of Artificial Sequence: Synthetic epitope
SRTPVETVNI

SEQ ID NO: 47589 - protein, 10 aa, Artificial Sequence
  Description of Artificial Sequence: Synthetic epitope
SRTRAIGNAA

SEQ ID NO: 47590 - protein, 10 aa, Artificial Sequence
  Description of Artificial Sequence: Synthetic epitope
SRTREETAAQ

SEQ ID NO: 47591 - protein, 10 aa, Artificial Sequence
  Description of Artificial Sequence: Synthetic epitope
SRTRSSKAIL

SEQ ID NO: 47592 - protein, 10 aa, Artificial Sequence
  Description of Artificial Sequence: Synthetic epitope
SRTRTKALQE

SEQ ID NO: 47593 - protein, 10 aa, Artificial Sequence
  Description of Artificial Sequence: Synthetic epitope
SRTSLMGKSH

SEQ ID NO: 47594 - protein, 10 aa, Artificial Sequence
  Description of Artificial Sequence: Synthetic epitope
SRTSSATSGL

SEQ ID NO: 47595 - protein, 10 aa, Artificial Sequence
  Description of Artificial Sequence: Synthetic epitope
SRTSSTFPSV

SEQ ID NO: 47596 - protein, 10 aa, Artificial Sequence
  Description of Artificial Sequence: Synthetic epitope
SRTTLEVLQL

SEQ ID NO: 47597 - protein, 10 aa, Artificial Sequence
  Description of Artificial Sequence: Synthetic epitope
SRTVSRVESF

SEQ ID NO: 47598 - protein, 10 aa, Artificial Sequence
  Description of Artificial Sequence: Synthetic epitope
SRVARKAHVA

SEQ ID NO: 47599 - protein, 10 aa, Artificial Sequence
  Description of Artificial Sequence: Synthetic epitope
SRVEELAERL

SEQ ID NO: 47600 - protein, 10 aa, Artificial Sequence
  Description of Artificial Sequence: Synthetic epitope
SRVENSLDAS

SEQ ID NO: 47601 - protein, 10 aa, Artificial Sequence
  Description of Artificial Sequence: Synthetic epitope
SRVGLRHKLQ

SEQ ID NO: 47602 - protein, 10 aa, Artificial Sequence
  Description of Artificial Sequence: Synthetic epitope
SRVLEQVSAQ

SEQ ID NO: 47603 - protein, 10 aa, Artificial Sequence
  Description of Artificial Sequence: Synthetic epitope
SRVMGTNDGK

SEQ ID NO: 47604 - protein, 10 aa, Artificial Sequence
  Description of Artificial Sequence: Synthetic epitope
SRVNGAGLAQ

SEQ ID NO: 47605 - protein, 10 aa, Artificial Sequence
  Description of Artificial Sequence: Synthetic epitope
SRVNRLSVLG

SEQ ID NO: 47606 - protein, 10 aa, Artificial Sequence
  Description of Artificial Sequence: Synthetic epitope
SRVPAIRYKD

SEQ ID NO: 47607 - protein, 10 aa, Artificial Sequence
  Description of Artificial Sequence: Synthetic epitope
SRVQVQKAFA

SEQ ID NO: 47608 - protein, 10 aa, Artificial Sequence
  Description of Artificial Sequence: Synthetic epitope
SRVRSSPHIS

SEQ ID NO: 47609 - protein, 10 aa, Artificial Sequence
  Description of Artificial Sequence: Synthetic epitope
SRVSENQSAQ

SEQ ID NO: 47610 - protein, 10 aa, Artificial Sequence
  Description of Artificial Sequence: Synthetic epitope
SRVSETEYSA

SEQ ID NO: 47611 - protein, 10 aa, Artificial Sequence
  Description of Artificial Sequence: Synthetic epitope
SRVSSAKLNN

SEQ ID NO: 47612 - protein, 10 aa, Artificial Sequence
  Description of Artificial Sequence: Synthetic epitope
SRVSSDLSRI

SEQ ID NO: 47613 - protein, 10 aa, Artificial Sequence
  Description of Artificial Sequence: Synthetic epitope
SRVSSIRSVG

SEQ ID NO: 47614 - protein, 10 aa, Artificial Sequence
  Description of Artificial Sequence: Synthetic epitope
SRVSVAARDG

SEQ ID NO: 47615 - protein, 10 aa, Artificial Sequence
  Description of Artificial Sequence: Synthetic epitope
SRVSVTKPFM

SEQ ID NO: 47616 - protein, 10 aa, Artificial Sequence
  Description of Artificial Sequence: Synthetic epitope
SRVTISTTGQ

SEQ ID NO: 47617 - protein, 10 aa, Artificial Sequence
  Description of Artificial Sequence: Synthetic epitope
SRVVLSQGSK

SEQ ID NO: 47618 - protein, 10 aa, Artificial Sequence
  Description of Artificial Sequence: Synthetic epitope
SRVVQVVKPH

SEQ ID NO: 47619 - protein, 10 aa, Artificial Sequence
  Description of Artificial Sequence: Synthetic epitope
SRWAKKRPIV

SEQ ID NO: 47620 - protein, 10 aa, Artificial Sequence
  Description of Artificial Sequence: Synthetic epitope
SRYGILMTKQ

SEQ ID NO: 47621 - protein, 10 aa, Artificial Sequence
  Description of Artificial Sequence: Synthetic epitope
SRYLHAHLDT

SEQ ID NO: 47622 - protein, 10 aa, Artificial Sequence
  Description of Artificial Sequence: Synthetic epitope
SRYQSTVISH

SEQ ID NO: 47623 - protein, 10 aa, Artificial Sequence
  Description of Artificial Sequence: Synthetic epitope
SRYVASSELE

SEQ ID NO: 47624 - protein, 10 aa, Artificial Sequence
  Description of Artificial Sequence: Synthetic epitope
SSAAGLGAVD

SEQ ID NO: 47625 - protein, 10 aa, Artificial Sequence
  Description of Artificial Sequence: Synthetic epitope
SSAAQNLRRA

SEQ ID NO: 47626 - protein, 10 aa, Artificial Sequence
  Description of Artificial Sequence: Synthetic epitope
SSAAQTEKGG

SEQ ID NO: 47627 - protein, 10 aa, Artificial Sequence
  Description of Artificial Sequence: Synthetic epitope
SSAASDRTST

SEQ ID NO: 47628 - protein, 10 aa, Artificial Sequence
  Description of Artificial Sequence: Synthetic epitope
SSAASESLAR

SEQ ID NO: 47629 - protein, 10 aa, Artificial Sequence
  Description of Artificial Sequence: Synthetic epitope
SSAASNRSRN

SEQ ID NO: 47630 - protein, 10 aa, Artificial Sequence
  Description of Artificial Sequence: Synthetic epitope
SSAASSGELL

SEQ ID NO: 47631 - protein, 10 aa, Artificial Sequence
  Description of Artificial Sequence: Synthetic epitope
SSAASSPERK

SEQ ID NO: 47632 - protein, 10 aa, Artificial Sequence
  Description of Artificial Sequence: Synthetic epitope
SSAASSTITA

SEQ ID NO: 47633 - protein, 10 aa, Artificial Sequence
  Description of Artificial Sequence: Synthetic epitope
SSAAVQTRIG

SEQ ID NO: 47634 - protein, 10 aa, Artificial Sequence
  Description of Artificial Sequence: Synthetic epitope
SSADDASLVN

SEQ ID NO: 47635 - protein, 10 aa, Artificial Sequence
  Description of Artificial Sequence: Synthetic epitope
SSADTETKPA

SEQ ID NO: 47636 - protein, 10 aa, Artificial Sequence
  Description of Artificial Sequence: Synthetic epitope
SSADVSKVNR

SEQ ID NO: 47637 - protein, 10 aa, Artificial Sequence
  Description of Artificial Sequence: Synthetic epitope
SSAEAKSKRS

SEQ ID NO: 47638 - protein, 10 aa, Artificial Sequence
  Description of Artificial Sequence: Synthetic epitope
SSAEASGTEE

SEQ ID NO: 47639 - protein, 10 aa, Artificial Sequence
  Description of Artificial Sequence: Synthetic epitope
SSAEDEKNTA

SEQ ID NO: 47640 - protein, 10 aa, Artificial Sequence
  Description of Artificial Sequence: Synthetic epitope
SSAEEMVTLL

SEQ ID NO: 47641 - protein, 10 aa, Artificial Sequence
  Description of Artificial Sequence: Synthetic epitope
SSAEERMQSE

SEQ ID NO: 47642 - protein, 10 aa, Artificial Sequence
  Description of Artificial Sequence: Synthetic epitope
SSAEGTVDKD

SEQ ID NO: 47643 - protein, 10 aa, Artificial Sequence
  Description of Artificial Sequence: Synthetic epitope
SSAELGSTKG

SEQ ID NO: 47644 - protein, 10 aa, Artificial Sequence
  Description of Artificial Sequence: Synthetic epitope
SSAELSTSAP

SEQ ID NO: 47645 - protein, 10 aa, Artificial Sequence
  Description of Artificial Sequence: Synthetic epitope
SSAEQMLQRL

SEQ ID NO: 47646 - protein, 10 aa, Artificial Sequence
  Description of Artificial Sequence: Synthetic epitope
SSAESSVKGD

SEQ ID NO: 47647 - protein, 10 aa, Artificial Sequence
  Description of Artificial Sequence: Synthetic epitope
SSAETIASPK

SEQ ID NO: 47648 - protein, 10 aa, Artificial Sequence
  Description of Artificial Sequence: Synthetic epitope
SSAETLRTVR

SEQ ID NO: 47649 - protein, 10 aa, Artificial Sequence
  Description of Artificial Sequence: Synthetic epitope
SSAETNLEAL

SEQ ID NO: 47650 - protein, 10 aa, Artificial Sequence
  Description of Artificial Sequence: Synthetic epitope
SSAEVKSAWT

SEQ ID NO: 47651 - protein, 10 aa, Artificial Sequence
  Description of Artificial Sequence: Synthetic epitope
SSAGELSSTL

SEQ ID NO: 47652 - protein, 10 aa, Artificial Sequence
  Description of Artificial Sequence: Synthetic epitope
SSAGEVTKQT

SEQ ID NO: 47653 - protein, 10 aa, Artificial Sequence
  Description of Artificial Sequence: Synthetic epitope
SSAGSEQQNQ

SEQ ID NO: 47654 - protein, 10 aa, Artificial Sequence
  Description of Artificial Sequence: Synthetic epitope
SSAGSTRNKD

SEQ ID NO: 47655 - protein, 10 aa, Artificial Sequence
  Description of Artificial Sequence: Synthetic epitope
SSAIIAKPGE

SEQ ID NO: 47656 - protein, 10 aa, Artificial Sequence
  Description of Artificial Sequence: Synthetic epitope
SSAILKVIQT

SEQ ID NO: 47657 - protein, 10 aa, Artificial Sequence
  Description of Artificial Sequence: Synthetic epitope
SSAISLPTQS

SEQ ID NO: 47658 - protein, 10 aa, Artificial Sequence
  Description of Artificial Sequence: Synthetic epitope
SSAISSDKHE

SEQ ID NO: 47659 - protein, 10 aa, Artificial Sequence
  Description of Artificial Sequence: Synthetic epitope
SSAITREKEM

SEQ ID NO: 47660 - protein, 10 aa, Artificial Sequence
  Description of Artificial Sequence: Synthetic epitope
SSAKAGVSKD

SEQ ID NO: 47661 - protein, 10 aa, Artificial Sequence
  Description of Artificial Sequence: Synthetic epitope
SSAKDEVKLL

SEQ ID NO: 47662 - protein, 10 aa, Artificial Sequence
  Description of Artificial Sequence: Synthetic epitope
SSAKNSDHEY

SEQ ID NO: 47663 - protein, 10 aa, Artificial Sequence
  Description of Artificial Sequence: Synthetic epitope
SSAKRLSPKM

SEQ ID NO: 47664 - protein, 10 aa, Artificial Sequence
  Description of Artificial Sequence: Synthetic epitope
SSAKRPRERE

SEQ ID NO: 47665 - protein, 10 aa, Artificial Sequence
  Description of Artificial Sequence: Synthetic epitope
SSAKRSQTTG

SEQ ID NO: 47666 - protein, 10 aa, Artificial Sequence
  Description of Artificial Sequence: Synthetic epitope
SSALDMENFR

SEQ ID NO: 47667 - protein, 10 aa, Artificial Sequence
  Description of Artificial Sequence: Synthetic epitope
SSALLVLEAQ

SEQ ID NO: 47668 - protein, 10 aa, Artificial Sequence
  Description of Artificial Sequence: Synthetic epitope
SSALSEREAS

SEQ ID NO: 47669 - protein, 10 aa, Artificial Sequence
  Description of Artificial Sequence: Synthetic epitope
SSALSVLGKV

SEQ ID NO: 47670 - protein, 10 aa, Artificial Sequence
  Description of Artificial Sequence: Synthetic epitope
SSALTESSGH

SEQ ID NO: 47671 - protein, 10 aa, Artificial Sequence
  Description of Artificial Sequence: Synthetic epitope
SSALTGVLSA

SEQ ID NO: 47672 - protein, 10 aa, Artificial Sequence
  Description of Artificial Sequence: Synthetic epitope
SSALTRQSSK

SEQ ID NO: 47673 - protein, 10 aa, Artificial Sequence
  Description of Artificial Sequence: Synthetic epitope
SSALYEEAFT

SEQ ID NO: 47674 - protein, 10 aa, Artificial Sequence
  Description of Artificial Sequence: Synthetic epitope
SSAMEELATE

SEQ ID NO: 47675 - protein, 10 aa, Artificial Sequence
  Description of Artificial Sequence: Synthetic epitope
SSAPKLEYTV

SEQ ID NO: 47676 - protein, 10 aa, Artificial Sequence
  Description of Artificial Sequence: Synthetic epitope
SSAPSSRAEP

SEQ ID NO: 47677 - protein, 10 aa, Artificial Sequence
  Description of Artificial Sequence: Synthetic epitope
SSAQASVLKM

SEQ ID NO: 47678 - protein, 10 aa, Artificial Sequence
  Description of Artificial Sequence: Synthetic epitope
SSAQATSVPP

SEQ ID NO: 47679 - protein, 10 aa, Artificial Sequence
  Description of Artificial Sequence: Synthetic epitope
SSAQDSTSEN

SEQ ID NO: 47680 - protein, 10 aa, Artificial Sequence
  Description of Artificial Sequence: Synthetic epitope
SSAQKSLSEY

SEQ ID NO: 47681 - protein, 10 aa, Artificial Sequence
  Description of Artificial Sequence: Synthetic epitope
SSAQKVATSD

SEQ ID NO: 47682 - protein, 10 aa, Artificial Sequence
  Description of Artificial Sequence: Synthetic epitope
SSAQNKQVDE

SEQ ID NO: 47683 - protein, 10 aa, Artificial Sequence
  Description of Artificial Sequence: Synthetic epitope
SSAQQVAVSR

SEQ ID NO: 47684 - protein, 10 aa, Artificial Sequence
  Description of Artificial Sequence: Synthetic epitope
SSAQSYPPLL

SEQ ID NO: 47685 - protein, 10 aa, Artificial Sequence
  Description of Artificial Sequence: Synthetic epitope
SSAQWKSAVQ

SEQ ID NO: 47686 - protein, 10 aa, Artificial Sequence
  Description of Artificial Sequence: Synthetic epitope
SSARAADIQS

SEQ ID NO: 47687 - protein, 10 aa, Artificial Sequence
  Description of Artificial Sequence: Synthetic epitope
SSAREMKSIT

SEQ ID NO: 47688 - protein, 10 aa, Artificial Sequence
  Description of Artificial Sequence: Synthetic epitope
SSARFLSRSI

SEQ ID NO: 47689 - protein, 10 aa, Artificial Sequence
  Description of Artificial Sequence: Synthetic epitope
SSARKQAKSY

SEQ ID NO: 47690 - protein, 10 aa, Artificial Sequence
  Description of Artificial Sequence: Synthetic epitope
SSARMEAEDH

SEQ ID NO: 47691 - protein, 10 aa, Artificial Sequence
  Description of Artificial Sequence: Synthetic epitope
SSARNPNNMQ

SEQ ID NO: 47692 - protein, 10 aa, Artificial Sequence
  Description of Artificial Sequence: Synthetic epitope
SSARQALGIT

SEQ ID NO: 47693 - protein, 10 aa, Artificial Sequence
  Description of Artificial Sequence: Synthetic epitope
SSARSSLRWE

SEQ ID NO: 47694 - protein, 10 aa, Artificial Sequence
  Description of Artificial Sequence: Synthetic epitope
SSASAELTLQ

SEQ ID NO: 47695 - protein, 10 aa, Artificial Sequence
  Description of Artificial Sequence: Synthetic epitope
SSASALGTAS

SEQ ID NO: 47696 - protein, 10 aa, Artificial Sequence
  Description of Artificial Sequence: Synthetic epitope
SSASEAFATS

SEQ ID NO: 47697 - protein, 10 aa, Artificial Sequence
  Description of Artificial Sequence: Synthetic epitope
SSASETSTTQ

SEQ ID NO: 47698 - protein, 10 aa, Artificial Sequence
  Description of Artificial Sequence: Synthetic epitope
SSASISTTQV

SEQ ID NO: 47699 - protein, 10 aa, Artificial Sequence
  Description of Artificial Sequence: Synthetic epitope
SSASKKPLKE

SEQ ID NO: 47700 - protein, 10 aa, Artificial Sequence
  Description of Artificial Sequence: Synthetic epitope
SSASKLRTNL

SEQ ID NO: 47701 - protein, 10 aa, Artificial Sequence
  Description of Artificial Sequence: Synthetic epitope
SSASKNLKFK

SEQ ID NO: 47702 - protein, 10 aa, Artificial Sequence
  Description of Artificial Sequence: Synthetic epitope
SSASLAHMKA

SEQ ID NO: 47703 - protein, 10 aa, Artificial Sequence
  Description of Artificial Sequence: Synthetic epitope
SSASLLTPQS

SEQ ID NO: 47704 - protein, 10 aa, Artificial Sequence
  Description of Artificial Sequence: Synthetic epitope
SSASNLVSTQ

SEQ ID NO: 47705 - protein, 10 aa, Artificial Sequence
  Description of Artificial Sequence: Synthetic epitope
SSASNRGGSI

SEQ ID NO: 47706 - protein, 10 aa, Artificial Sequence
  Description of Artificial Sequence: Synthetic epitope
SSASNRVAQK

SEQ ID NO: 47707 - protein, 10 aa, Artificial Sequence
  Description of Artificial Sequence: Synthetic epitope
SSASPSKATK

SEQ ID NO: 47708 - protein, 10 aa, Artificial Sequence
  Description of Artificial Sequence: Synthetic epitope
SSASQGGSKE

SEQ ID NO: 47709 - protein, 10 aa, Artificial Sequence
  Description of Artificial Sequence: Synthetic epitope
SSASQRSLQM

SEQ ID NO: 47710 - protein, 10 aa, Artificial Sequence
  Description of Artificial Sequence: Synthetic epitope
SSASSAGALE

SEQ ID NO: 47711 - protein, 10 aa, Artificial Sequence
  Description of Artificial Sequence: Synthetic epitope
SSASSNEVKY

SEQ ID NO: 47712 - protein, 10 aa, Artificial Sequence
  Description of Artificial Sequence: Synthetic epitope
SSASTALSQD

SEQ ID NO: 47713 - protein, 10 aa, Artificial Sequence
  Description of Artificial Sequence: Synthetic epitope
SSASTFEQSI

SEQ ID NO: 47714 - protein, 10 aa, Artificial Sequence
  Description of Artificial Sequence: Synthetic epitope
SSASTTLGRQ

SEQ ID NO: 47715 - protein, 10 aa, Artificial Sequence
  Description of Artificial Sequence: Synthetic epitope
SSASVERGST

SEQ ID NO: 47716 - protein, 10 aa, Artificial Sequence
  Description of Artificial Sequence: Synthetic epitope
SSASVSPVAK

SEQ ID NO: 47717 - protein, 10 aa, Artificial Sequence
  Description of Artificial Sequence: Synthetic epitope
SSASYAASIA

SEQ ID NO: 47718 - protein, 10 aa, Artificial Sequence
  Description of Artificial Sequence: Synthetic epitope
SSATAKTQHN

SEQ ID NO: 47719 - protein, 10 aa, Artificial Sequence
  Description of Artificial Sequence: Synthetic epitope
SSATASSTAT

SEQ ID NO: 47720 - protein, 10 aa, Artificial Sequence
  Description of Artificial Sequence: Synthetic epitope
SSATEEAEES

SEQ ID NO: 47721 - protein, 10 aa, Artificial Sequence
  Description of Artificial Sequence: Synthetic epitope
SSATEKNSIA

SEQ ID NO: 47722 - protein, 10 aa, Artificial Sequence
  Description of Artificial Sequence: Synthetic epitope
SSATNEALGR

SEQ ID NO: 47723 - protein, 10 aa, Artificial Sequence
  Description of Artificial Sequence: Synthetic epitope
SSATNTSTRP

SEQ ID NO: 47724 - protein, 10 aa, Artificial Sequence
  Description of Artificial Sequence: Synthetic epitope
SSATSFSDLP

SEQ ID NO: 47725 - protein, 10 aa, Artificial Sequence
  Description of Artificial Sequence: Synthetic epitope
SSATSNRNQT

SEQ ID NO: 47726 - protein, 10 aa, Artificial Sequence
  Description of Artificial Sequence: Synthetic epitope
SSATTNSTGN

SEQ ID NO: 47727 - protein, 10 aa, Artificial Sequence
  Description of Artificial Sequence: Synthetic epitope
SSATTSKAKY

SEQ ID NO: 47728 - protein, 10 aa, Artificial Sequence
  Description of Artificial Sequence: Synthetic epitope
SSATTSNFTF

SEQ ID NO: 47729 - protein, 10 aa, Artificial Sequence
  Description of Artificial Sequence: Synthetic epitope
SSATVSTGSL

SEQ ID NO: 47730 - protein, 10 aa, Artificial Sequence
  Description of Artificial Sequence: Synthetic epitope
SSAVAGRLER

SEQ ID NO: 47731 - protein, 10 aa, Artificial Sequence
  Description of Artificial Sequence: Synthetic epitope
SSAVGTALPK

SEQ ID NO: 47732 - protein, 10 aa, Artificial Sequence
  Description of Artificial Sequence: Synthetic epitope
SSAVIVPQPE

SEQ ID NO: 47733 - protein, 10 aa, Artificial Sequence
  Description of Artificial Sequence: Synthetic epitope
SSAVNKNKGK

SEQ ID NO: 47734 - protein, 10 aa, Artificial Sequence
  Description of Artificial Sequence: Synthetic epitope
SSAVSDRGHR

SEQ ID NO: 47735 - protein, 10 aa, Artificial Sequence
  Description of Artificial Sequence: Synthetic epitope
SSAVTSGLAS

SEQ ID NO: 47736 - protein, 10 aa, Artificial Sequence
  Description of Artificial Sequence: Synthetic epitope
SSAWQLAKQK

SEQ ID NO: 47737 - protein, 10 aa, Artificial Sequence
  Description of Artificial Sequence: Synthetic epitope
SSAWQTFPEE

SEQ ID NO: 47738 - protein, 10 aa, Artificial Sequence
  Description of Artificial Sequence: Synthetic epitope
SSAWSTVFRH

SEQ ID NO: 47739 - protein, 10 aa, Artificial Sequence
  Description of Artificial Sequence: Synthetic epitope
SSAYLSTKDQ

SEQ ID NO: 47740 - protein, 10 aa, Artificial Sequence
  Description of Artificial Sequence: Synthetic epitope
SSDAIISSPE

SEQ ID NO: 47741 - protein, 10 aa, Artificial Sequence
  Description of Artificial Sequence: Synthetic epitope
SSDALLSDKQ

SEQ ID NO: 47742 - protein, 10 aa, Artificial Sequence
  Description of Artificial Sequence: Synthetic epitope
SSDAMSSQQN

SEQ ID NO: 47743 - protein, 10 aa, Artificial Sequence
  Description of Artificial Sequence: Synthetic epitope
SSDDIGEASA

SEQ ID NO: 47744 - protein, 10 aa, Artificial Sequence
  Description of Artificial Sequence: Synthetic epitope
SSDDSTTNAQ

SEQ ID NO: 47745 - protein, 10 aa, Artificial Sequence
  Description of Artificial Sequence: Synthetic epitope
SSDEARQVDL

SEQ ID NO: 47746 - protein, 10 aa, Artificial Sequence
  Description of Artificial Sequence: Synthetic epitope
SSDEEQQEIS

SEQ ID NO: 47747 - protein, 10 aa, Artificial Sequence
  Description of Artificial Sequence: Synthetic epitope
SSDEETLSER

SEQ ID NO: 47748 - protein, 10 aa, Artificial Sequence
  Description of Artificial Sequence: Synthetic epitope
SSDEITMKSE

SEQ ID NO: 47749 - protein, 10 aa, Artificial Sequence
  Description of Artificial Sequence: Synthetic epitope
SSDETANSGE

SEQ ID NO: 47750 - protein, 10 aa, Artificial Sequence
  Description of Artificial Sequence: Synthetic epitope
SSDFFESEDQ

SEQ ID NO: 47751 - protein, 10 aa, Artificial Sequence
  Description of Artificial Sequence: Synthetic epitope
SSDHEATAMM

SEQ ID NO: 47752 - protein, 10 aa, Artificial Sequence
  Description of Artificial Sequence: Synthetic epitope
SSDISPVSNE

SEQ ID NO: 47753 - protein, 10 aa, Artificial Sequence
  Description of Artificial Sequence: Synthetic epitope
SSDKHALVTP

SEQ ID NO: 47754 - protein, 10 aa, Artificial Sequence
  Description of Artificial Sequence: Synthetic epitope
SSDKKVLSAI

SEQ ID NO: 47755 - protein, 10 aa, Artificial Sequence
  Description of Artificial Sequence: Synthetic epitope
SSDKTANIVE

SEQ ID NO: 47756 - protein, 10 aa, Artificial Sequence
  Description of Artificial Sequence: Synthetic epitope
SSDLARQKFG

SEQ ID NO: 47757 - protein, 10 aa, Artificial Sequence
  Description of Artificial Sequence: Synthetic epitope
SSDLISGTKA

SEQ ID NO: 47758 - protein, 10 aa, Artificial Sequence
  Description of Artificial Sequence: Synthetic epitope
SSDMRTAITE

SEQ ID NO: 47759 - protein, 10 aa, Artificial Sequence
  Description of Artificial Sequence: Synthetic epitope
SSDMSASAGY

SEQ ID NO: 47760 - protein, 10 aa, Artificial Sequence
  Description of Artificial Sequence: Synthetic epitope
SSDPEINTKK

SEQ ID NO: 47761 - protein, 10 aa, Artificial Sequence
  Description of Artificial Sequence: Synthetic epitope
SSDPEQRNSS

SEQ ID NO: 47762 - protein, 10 aa, Artificial Sequence
  Description of Artificial Sequence: Synthetic epitope
SSDPKVTRDQ

SEQ ID NO: 47763 - protein, 10 aa, Artificial Sequence
  Description of Artificial Sequence: Synthetic epitope
SSDQNTLDGT

SEQ ID NO: 47764 - protein, 10 aa, Artificial Sequence
  Description of Artificial Sequence: Synthetic epitope
SSDQQEKRKA

SEQ ID NO: 47765 - protein, 10 aa, Artificial Sequence
  Description of Artificial Sequence: Synthetic epitope
SSDQQNSSAD

SEQ ID NO: 47766 - protein, 10 aa, Artificial Sequence
  Description of Artificial Sequence: Synthetic epitope
SSDQSVNPFE

SEQ ID NO: 47767 - protein, 10 aa, Artificial Sequence
  Description of Artificial Sequence: Synthetic epitope
SSDQVNFKKD

SEQ ID NO: 47768 - protein, 10 aa, Artificial Sequence
  Description of Artificial Sequence: Synthetic epitope
SSDRAMMNAF

SEQ ID NO: 47769 - protein, 10 aa, Artificial Sequence
  Description of Artificial Sequence: Synthetic epitope
SSDRKKQREF

SEQ ID NO: 47770 - protein, 10 aa, Artificial Sequence
  Description of Artificial Sequence: Synthetic epitope
SSDRKMSKSA

SEQ ID NO: 47771 - protein, 10 aa, Artificial Sequence
  Description of Artificial Sequence: Synthetic epitope
SSDRSRKREL

SEQ ID NO: 47772 - protein, 10 aa, Artificial Sequence
  Description of Artificial Sequence: Synthetic epitope
SSDRTINLLE

SEQ ID NO: 47773 - protein, 10 aa, Artificial Sequence
  Description of Artificial Sequence: Synthetic epitope
SSDSAASFEV

SEQ ID NO: 47774 - protein, 10 aa, Artificial Sequence
  Description of Artificial Sequence: Synthetic epitope
SSDSDDLEED

SEQ ID NO: 47775 - protein, 10 aa, Artificial Sequence
  Description of Artificial Sequence: Synthetic epitope
SSDSEAQTSQ

SEQ ID NO: 47776 - protein, 10 aa, Artificial Sequence
  Description of Artificial Sequence: Synthetic epitope
SSDSEGTINA

SEQ ID NO: 47777 - protein, 10 aa, Artificial Sequence
  Description of Artificial Sequence: Synthetic epitope
SSDSFENLEE

SEQ ID NO: 47778 - protein, 10 aa, Artificial Sequence
  Description of Artificial Sequence: Synthetic epitope
SSDSHDSEEN

SEQ ID NO: 47779 - protein, 10 aa, Artificial Sequence
  Description of Artificial Sequence: Synthetic epitope
SSDSLEFDRS

SEQ ID NO: 47780 - protein, 10 aa, Artificial Sequence
  Description of Artificial Sequence: Synthetic epitope
SSDSQDKAEA

SEQ ID NO: 47781 - protein, 10 aa, Artificial Sequence
  Description of Artificial Sequence: Synthetic epitope
SSDSSFEVRG

SEQ ID NO: 47782 - protein, 10 aa, Artificial Sequence
  Description of Artificial Sequence: Synthetic epitope
SSDSTSLLAK

SEQ ID NO: 47783 - protein, 10 aa, Artificial Sequence
  Description of Artificial Sequence: Synthetic epitope
SSDTLKLQKK

SEQ ID NO: 47784 - protein, 10 aa, Artificial Sequence
  Description of Artificial Sequence: Synthetic epitope
SSDTLYKVLL

SEQ ID NO: 47785 - protein, 10 aa, Artificial Sequence
  Description of Artificial Sequence: Synthetic epitope
SSEAASQFYP

SEQ ID NO: 47786 - protein, 10 aa, Artificial Sequence
  Description of Artificial Sequence: Synthetic epitope
SSEADDQEVS

SEQ ID NO: 47787 - protein, 10 aa, Artificial Sequence
  Description of Artificial Sequence: Synthetic epitope
SSEAHLQQYS

SEQ ID NO: 47788 - protein, 10 aa, Artificial Sequence
  Description of Artificial Sequence: Synthetic epitope
SSEAKLGLSH

SEQ ID NO: 47789 - protein, 10 aa, Artificial Sequence
  Description of Artificial Sequence: Synthetic epitope
SSEALERAVR

SEQ ID NO: 47790 - protein, 10 aa, Artificial Sequence
  Description of Artificial Sequence: Synthetic epitope
SSEALLMADE

SEQ ID NO: 47791 - protein, 10 aa, Artificial Sequence
  Description of Artificial Sequence: Synthetic epitope
SSEAPAASAT

SEQ ID NO: 47792 - protein, 10 aa, Artificial Sequence
  Description of Artificial Sequence: Synthetic epitope
SSEAQTVQSL

SEQ ID NO: 47793 - protein, 10 aa, Artificial Sequence
  Description of Artificial Sequence: Synthetic epitope
SSEASHLDVS

SEQ ID NO: 47794 - protein, 10 aa, Artificial Sequence
  Description of Artificial Sequence: Synthetic epitope
SSEASLEAAL

SEQ ID NO: 47795 - protein, 10 aa, Artificial Sequence
  Description of Artificial Sequence: Synthetic epitope
SSEASTTSTI

SEQ ID NO: 47796 - protein, 10 aa, Artificial Sequence
  Description of Artificial Sequence: Synthetic epitope
SSEDRNRMKT

SEQ ID NO: 47797 - protein, 10 aa, Artificial Sequence
  Description of Artificial Sequence: Synthetic epitope
SSEEFSTKFN

SEQ ID NO: 47798 - protein, 10 aa, Artificial Sequence
  Description of Artificial Sequence: Synthetic epitope
SSEEGSSLTY

SEQ ID NO: 47799 - protein, 10 aa, Artificial Sequence
  Description of Artificial Sequence: Synthetic epitope
SSEEIEETRA

SEQ ID NO: 47800 - protein, 10 aa, Artificial Sequence
  Description of Artificial Sequence: Synthetic epitope
SSEELPLASS

SEQ ID NO: 47801 - protein, 10 aa, Artificial Sequence
  Description of Artificial Sequence: Synthetic epitope
SSEESAKELS

SEQ ID NO: 47802 - protein, 10 aa, Artificial Sequence
  Description of Artificial Sequence: Synthetic epitope
SSEETVDHQP

SEQ ID NO: 47803 - protein, 10 aa, Artificial Sequence
  Description of Artificial Sequence: Synthetic epitope
SSEEVKRDIS

SEQ ID NO: 47804 - protein, 10 aa, Artificial Sequence
  Description of Artificial Sequence: Synthetic epitope
SSEEVLKKIK

SEQ ID NO: 47805 - protein, 10 aa, Artificial Sequence
  Description of Artificial Sequence: Synthetic epitope
SSEFQINEQV

SEQ ID NO: 47806 - protein, 10 aa, Artificial Sequence
  Description of Artificial Sequence: Synthetic epitope
SSEGKLATKG

SEQ ID NO: 47807 - protein, 10 aa, Artificial Sequence
  Description of Artificial Sequence: Synthetic epitope
SSEGSISELE

SEQ ID NO: 47808 - protein, 10 aa, Artificial Sequence
  Description of Artificial Sequence: Synthetic epitope
SSEGSMKVKA

SEQ ID NO: 47809 - protein, 10 aa, Artificial Sequence
  Description of Artificial Sequence: Synthetic epitope
SSEGSSEIFQ

SEQ ID NO: 47810 - protein, 10 aa, Artificial Sequence
  Description of Artificial Sequence: Synthetic epitope
SSEGTDSQTS

SEQ ID NO: 47811 - protein, 10 aa, Artificial Sequence
  Description of Artificial Sequence: Synthetic epitope
SSEHAVIVKE

SEQ ID NO: 47812 - protein, 10 aa, Artificial Sequence
  Description of Artificial Sequence: Synthetic epitope
SSEHLSSAVE

SEQ ID NO: 47813 - protein, 10 aa, Artificial Sequence
  Description of Artificial Sequence: Synthetic epitope
SSEILDTLME

SEQ ID NO: 47814 - protein, 10 aa, Artificial Sequence
  Description of Artificial Sequence: Synthetic epitope
SSEKAALDGP

SEQ ID NO: 47815 - protein, 10 aa, Artificial Sequence
  Description of Artificial Sequence: Synthetic epitope
SSEKKERKGY

SEQ ID NO: 47816 - protein, 10 aa, Artificial Sequence
  Description of Artificial Sequence: Synthetic epitope
SSEKKLITDA

SEQ ID NO: 47817 - protein, 10 aa, Artificial Sequence
  Description of Artificial Sequence: Synthetic epitope
SSEKKSVLEK

SEQ ID NO: 47818 - protein, 10 aa, Artificial Sequence
  Description of Artificial Sequence: Synthetic epitope
SSEKNESHSA

SEQ ID NO: 47819 - protein, 10 aa, Artificial Sequence
  Description of Artificial Sequence: Synthetic epitope
SSEKTDFIKL

SEQ ID NO: 47820 - protein, 10 aa, Artificial Sequence
  Description of Artificial Sequence: Synthetic epitope
SSELASSQRT

SEQ ID NO: 47821 - protein, 10 aa, Artificial Sequence
  Description of Artificial Sequence: Synthetic epitope
SSELQLAPSM

SEQ ID NO: 47822 - protein, 10 aa, Artificial Sequence
  Description of Artificial Sequence: Synthetic epitope
SSELSLVGDT

SEQ ID NO: 47823 - protein, 10 aa, Artificial Sequence
  Description of Artificial Sequence: Synthetic epitope
SSELSSAPEG

SEQ ID NO: 47824 - protein, 10 aa, Artificial Sequence
  Description of Artificial Sequence: Synthetic epitope
SSEMEEFLTQ

SEQ ID NO: 47825 - protein, 10 aa, Artificial Sequence
  Description of Artificial Sequence: Synthetic epitope
SSEMQLTIDS

SEQ ID NO: 47826 - protein, 10 aa, Artificial Sequence
  Description of Artificial Sequence: Synthetic epitope
SSEMRRKLLA

SEQ ID NO: 47827 - protein, 10 aa, Artificial Sequence
  Description of Artificial Sequence: Synthetic epitope
SSENEKMGIR

SEQ ID NO: 47828 - protein, 10 aa, Artificial Sequence
  Description of Artificial Sequence: Synthetic epitope
SSENLLSRLR

SEQ ID NO: 47829 - protein, 10 aa, Artificial Sequence
  Description of Artificial Sequence: Synthetic epitope
SSENMSEESV

SEQ ID NO: 47830 - protein, 10 aa, Artificial Sequence
  Description of Artificial Sequence: Synthetic epitope
SSENRRSEPW

SEQ ID NO: 47831 - protein, 10 aa, Artificial Sequence
  Description of Artificial Sequence: Synthetic epitope
SSENSQEDQE

SEQ ID NO: 47832 - protein, 10 aa, Artificial Sequence
  Description of Artificial Sequence: Synthetic epitope
SSENTISSLK

SEQ ID NO: 47833 - protein, 10 aa, Artificial Sequence
  Description of Artificial Sequence: Synthetic epitope
SSEPKQTTRG

SEQ ID NO: 47834 - protein, 10 aa, Artificial Sequence
  Description of Artificial Sequence: Synthetic epitope
SSEPMRKKTK

SEQ ID NO: 47835 - protein, 10 aa, Artificial Sequence
  Description of Artificial Sequence: Synthetic epitope
SSEQEVRPAA

SEQ ID NO: 47836 - protein, 10 aa, Artificial Sequence
  Description of Artificial Sequence: Synthetic epitope
SSEQGASEAD

SEQ ID NO: 47837 - protein, 10 aa, Artificial Sequence
  Description of Artificial Sequence: Synthetic epitope
SSEQIQAENF

SEQ ID NO: 47838 - protein, 10 aa, Artificial Sequence
  Description of Artificial Sequence: Synthetic epitope
SSEQLDQFTQ

SEQ ID NO: 47839 - protein, 10 aa, Artificial Sequence
  Description of Artificial Sequence: Synthetic epitope
SSEQNDDTQQ

SEQ ID NO: 47840 - protein, 10 aa, Artificial Sequence
  Description of Artificial Sequence: Synthetic epitope
SSEQNTFLIN

SEQ ID NO: 47841 - protein, 10 aa, Artificial Sequence
  Description of Artificial Sequence: Synthetic epitope
SSEQSSALNT

SEQ ID NO: 47842 - protein, 10 aa, Artificial Sequence
  Description of Artificial Sequence: Synthetic epitope
SSEQTTADSS

SEQ ID NO: 47843 - protein, 10 aa, Artificial Sequence
  Description of Artificial Sequence: Synthetic epitope
SSEQVAKAGG

SEQ ID NO: 47844 - protein, 10 aa, Artificial Sequence
  Description of Artificial Sequence: Synthetic epitope
SSERIDKQIR

SEQ ID NO: 47845 - protein, 10 aa, Artificial Sequence
  Description of Artificial Sequence: Synthetic epitope
SSERNESVIH

SEQ ID NO: 47846 - protein, 10 aa, Artificial Sequence
  Description of Artificial Sequence: Synthetic epitope
SSERQDIAVI

SEQ ID NO: 47847 - protein, 10 aa, Artificial Sequence
  Description of Artificial Sequence: Synthetic epitope
SSESEDRNAG

SEQ ID NO: 47848 - protein, 10 aa, Artificial Sequence
  Description of Artificial Sequence: Synthetic epitope
SSESIAQSID

SEQ ID NO: 47849 - protein, 10 aa, Artificial Sequence
  Description of Artificial Sequence: Synthetic epitope
SSESKALKHE

SEQ ID NO: 47850 - protein, 10 aa, Artificial Sequence
  Description of Artificial Sequence: Synthetic epitope
SSESLSIIDV

SEQ ID NO: 47851 - protein, 10 aa, Artificial Sequence
  Description of Artificial Sequence: Synthetic epitope
SSESNRDRRE

SEQ ID NO: 47852 - protein, 10 aa, Artificial Sequence
  Description of Artificial Sequence: Synthetic epitope
SSESSDLQLE

SEQ ID NO: 47853 - protein, 10 aa, Artificial Sequence
  Description of Artificial Sequence: Synthetic epitope
SSESTLAQKA

SEQ ID NO: 47854 - protein, 10 aa, Artificial Sequence
  Description of Artificial Sequence: Synthetic epitope
SSESTPKTSA

SEQ ID NO: 47855 - protein, 10 aa, Artificial Sequence
  Description of Artificial Sequence: Synthetic epitope
SSESVKSLTE

SEQ ID NO: 47856 - protein, 10 aa, Artificial Sequence
  Description of Artificial Sequence: Synthetic epitope
SSETASTTAD

SEQ ID NO: 47857 - protein, 10 aa, Artificial Sequence
  Description of Artificial Sequence: Synthetic epitope
SSETQVHTAA

SEQ ID NO: 47858 - protein, 10 aa, Artificial Sequence
  Description of Artificial Sequence: Synthetic epitope
SSEVFSDAAK

SEQ ID NO: 47859 - protein, 10 aa, Artificial Sequence
  Description of Artificial Sequence: Synthetic epitope
SSEVKEVEEN

SEQ ID NO: 47860 - protein, 10 aa, Artificial Sequence
  Description of Artificial Sequence: Synthetic epitope
SSEVKKSQES

SEQ ID NO: 47861 - protein, 10 aa, Artificial Sequence
  Description of Artificial Sequence: Synthetic epitope
SSEVLVLAET

SEQ ID NO: 47862 - protein, 10 aa, Artificial Sequence
  Description of Artificial Sequence: Synthetic epitope
SSEVQDTNEV

SEQ ID NO: 47863 - protein, 10 aa, Artificial Sequence
  Description of Artificial Sequence: Synthetic epitope
SSEVSIDHKA

SEQ ID NO: 47864 - protein, 10 aa, Artificial Sequence
  Description of Artificial Sequence: Synthetic epitope
SSEVSKPKLE

SEQ ID NO: 47865 - protein, 10 aa, Artificial Sequence
  Description of Artificial Sequence: Synthetic epitope
SSEVSSEVNF

SEQ ID NO: 47866 - protein, 10 aa, Artificial Sequence
  Description of Artificial Sequence: Synthetic epitope
SSEVTISNLL

SEQ ID NO: 47867 - protein, 10 aa, Artificial Sequence
  Description of Artificial Sequence: Synthetic epitope
SSEVVTLEKE

SEQ ID NO: 47868 - protein, 10 aa, Artificial Sequence
  Description of Artificial Sequence: Synthetic epitope
SSFALEMQIP

SEQ ID NO: 47869 - protein, 10 aa, Artificial Sequence
  Description of Artificial Sequence: Synthetic epitope
SSFDNLFIDR

SEQ ID NO: 47870 - protein, 10 aa, Artificial Sequence
  Description of Artificial Sequence: Synthetic epitope
SSFDNLFIDR

SEQ ID NO: 47871 - protein, 10 aa, Artificial Sequence
  Description of Artificial Sequence: Synthetic epitope
SSFEKRAKIF

SEQ ID NO: 47872 - protein, 10 aa, Artificial Sequence
  Description of Artificial Sequence: Synthetic epitope
SSFELIVQKL

SEQ ID NO: 47873 - protein, 10 aa, Artificial Sequence
  Description of Artificial Sequence: Synthetic epitope
SSFGTSEFST

SEQ ID NO: 47874 - protein, 10 aa, Artificial Sequence
  Description of Artificial Sequence: Synthetic epitope
SSFHSRTSGK

SEQ ID NO: 47875 - protein, 10 aa, Artificial Sequence
  Description of Artificial Sequence: Synthetic epitope
SSFITKIISK

SEQ ID NO: 47876 - protein, 10 aa, Artificial Sequence
  Description of Artificial Sequence: Synthetic epitope
SSFMSREREL

SEQ ID NO: 47877 - protein, 10 aa, Artificial Sequence
  Description of Artificial Sequence: Synthetic epitope
SSFNGGRRDE

SEQ ID NO: 47878 - protein, 10 aa, Artificial Sequence
  Description of Artificial Sequence: Synthetic epitope
SSFNKMIPQQ

SEQ ID NO: 47879 - protein, 10 aa, Artificial Sequence
  Description of Artificial Sequence: Synthetic epitope
SSFPAYMSKT

SEQ ID NO: 47880 - protein, 10 aa, Artificial Sequence
  Description of Artificial Sequence: Synthetic epitope
SSFSKIHKRP

SEQ ID NO: 47881 - protein, 10 aa, Artificial Sequence
  Description of Artificial Sequence: Synthetic epitope
SSFSQITSGL

SEQ ID NO: 47882 - protein, 10 aa, Artificial Sequence
  Description of Artificial Sequence: Synthetic epitope
SSFSTVGESL

SEQ ID NO: 47883 - protein, 10 aa, Artificial Sequence
  Description of Artificial Sequence: Synthetic epitope
SSFTSIMGYL

SEQ ID NO: 47884 - protein, 10 aa, Artificial Sequence
  Description of Artificial Sequence: Synthetic epitope
SSGALKKQHK

SEQ ID NO: 47885 - protein, 10 aa, Artificial Sequence
  Description of Artificial Sequence: Synthetic epitope
SSGAQSIPST

SEQ ID NO: 47886 - protein, 10 aa, Artificial Sequence
  Description of Artificial Sequence: Synthetic epitope
SSGASSHAVP

SEQ ID NO: 47887 - protein, 10 aa, Artificial Sequence
  Description of Artificial Sequence: Synthetic epitope
SSGASSLHRH

SEQ ID NO: 47888 - protein, 10 aa, Artificial Sequence
  Description of Artificial Sequence: Synthetic epitope
SSGATGRVRH

SEQ ID NO: 47889 - protein, 10 aa, Artificial Sequence
  Description of Artificial Sequence: Synthetic epitope
SSGDSNSVRV

SEQ ID NO: 47890 - protein, 10 aa, Artificial Sequence
  Description of Artificial Sequence: Synthetic epitope
SSGEESEEDV

SEQ ID NO: 47891 - protein, 10 aa, Artificial Sequence
  Description of Artificial Sequence: Synthetic epitope
SSGEIESVDD

SEQ ID NO: 47892 - protein, 10 aa, Artificial Sequence
  Description of Artificial Sequence: Synthetic epitope
SSGGIPKNME

SEQ ID NO: 47893 - protein, 10 aa, Artificial Sequence
  Description of Artificial Sequence: Synthetic epitope
SSGGLTSQES

SEQ ID NO: 47894 - protein, 10 aa, Artificial Sequence
  Description of Artificial Sequence: Synthetic epitope
SSGHQSQSPN

SEQ ID NO: 47895 - protein, 10 aa, Artificial Sequence
  Description of Artificial Sequence: Synthetic epitope
SSGIEMLETD

SEQ ID NO: 47896 - protein, 10 aa, Artificial Sequence
  Description of Artificial Sequence: Synthetic epitope
SSGIKHTMTP

SEQ ID NO: 47897 - protein, 10 aa, Artificial Sequence
  Description of Artificial Sequence: Synthetic epitope
SSGINSTKSQ

SEQ ID NO: 47898 - protein, 10 aa, Artificial Sequence
  Description of Artificial Sequence: Synthetic epitope
SSGIRSLEEL

SEQ ID NO: 47899 - protein, 10 aa, Artificial Sequence
  Description of Artificial Sequence: Synthetic epitope
SSGITEQTVT

SEQ ID NO: 47900 - protein, 10 aa, Artificial Sequence
  Description of Artificial Sequence: Synthetic epitope
SSGITNGKTK

SEQ ID NO: 47901 - protein, 10 aa, Artificial Sequence
  Description of Artificial Sequence: Synthetic epitope
SSGKAEYSVK

SEQ ID NO: 47902 - protein, 10 aa, Artificial Sequence
  Description of Artificial Sequence: Synthetic epitope
SSGKDKNKSV

SEQ ID NO: 47903 - protein, 10 aa, Artificial Sequence
  Description of Artificial Sequence: Synthetic epitope
SSGKEQEEMK

SEQ ID NO: 47904 - protein, 10 aa, Artificial Sequence
  Description of Artificial Sequence: Synthetic epitope
SSGKKSLKRK

SEQ ID NO: 47905 - protein, 10 aa, Artificial Sequence
  Description of Artificial Sequence: Synthetic epitope
SSGKKVSHKS

SEQ ID NO: 47906 - protein, 10 aa, Artificial Sequence
  Description of Artificial Sequence: Synthetic epitope
SSGKNRKEES

SEQ ID NO: 47907 - protein, 10 aa, Artificial Sequence
  Description of Artificial Sequence: Synthetic epitope
SSGLAAVNVS

SEQ ID NO: 47908 - protein, 10 aa, Artificial Sequence
  Description of Artificial Sequence: Synthetic epitope
SSGLGGSTTD

SEQ ID NO: 47909 - protein, 10 aa, Artificial Sequence
  Description of Artificial Sequence: Synthetic epitope
SSGLQAAGSS

SEQ ID NO: 47910 - protein, 10 aa, Artificial Sequence
  Description of Artificial Sequence: Synthetic epitope
SSGLSEAASG

SEQ ID NO: 47911 - protein, 10 aa, Artificial Sequence
  Description of Artificial Sequence: Synthetic epitope
SSGLSKVAVP

SEQ ID NO: 47912 - protein, 10 aa, Artificial Sequence
  Description of Artificial Sequence: Synthetic epitope
SSGLSVVEQE

SEQ ID NO: 47913 - protein, 10 aa, Artificial Sequence
  Description of Artificial Sequence: Synthetic epitope
SSGLTSTDAL

SEQ ID NO: 47914 - protein, 10 aa, Artificial Sequence
  Description of Artificial Sequence: Synthetic epitope
SSGMTEGSEE

SEQ ID NO: 47915 - protein, 10 aa, Artificial Sequence
  Description of Artificial Sequence: Synthetic epitope
SSGNNRIEDK

SEQ ID NO: 47916 - protein, 10 aa, Artificial Sequence
  Description of Artificial Sequence: Synthetic epitope
SSGNQGELKA

SEQ ID NO: 47917 - protein, 10 aa, Artificial Sequence
  Description of Artificial Sequence: Synthetic epitope
SSGQFSMKNH

SEQ ID NO: 47918 - protein, 10 aa, Artificial Sequence
  Description of Artificial Sequence: Synthetic epitope
SSGQQRQAAR

SEQ ID NO: 47919 - protein, 10 aa, Artificial Sequence
  Description of Artificial Sequence: Synthetic epitope
SSGQSTDNSL

SEQ ID NO: 47920 - protein, 10 aa, Artificial Sequence
  Description of Artificial Sequence: Synthetic epitope
SSGQSTNFDK

SEQ ID NO: 47921 - protein, 10 aa, Artificial Sequence
  Description of Artificial Sequence: Synthetic epitope
SSGQVDTGQQ

SEQ ID NO: 47922 - protein, 10 aa, Artificial Sequence
  Description of Artificial Sequence: Synthetic epitope
SSGQVEVQPS

SEQ ID NO: 47923 - protein, 10 aa, Artificial Sequence
  Description of Artificial Sequence: Synthetic epitope
SSGQVISGDA

SEQ ID NO: 47924 - protein, 10 aa, Artificial Sequence
  Description of Artificial Sequence: Synthetic epitope
SSGRHANTDY

SEQ ID NO: 47925 - protein, 10 aa, Artificial Sequence
  Description of Artificial Sequence: Synthetic epitope
SSGSETEGEE

SEQ ID NO: 47926 - protein, 10 aa, Artificial Sequence
  Description of Artificial Sequence: Synthetic epitope
SSGSFSQRNH

SEQ ID NO: 47927 - protein, 10 aa, Artificial Sequence
  Description of Artificial Sequence: Synthetic epitope
SSGSIKSAKV

SEQ ID NO: 47928 - protein, 10 aa, Artificial Sequence
  Description of Artificial Sequence: Synthetic epitope
SSGSLEKSAA

SEQ ID NO: 47929 - protein, 10 aa, Artificial Sequence
  Description of Artificial Sequence: Synthetic epitope
SSGSQTVKED

SEQ ID NO: 47930 - protein, 10 aa, Artificial Sequence
  Description of Artificial Sequence: Synthetic epitope
SSGSSEVELP

SEQ ID NO: 47931 - protein, 10 aa, Artificial Sequence
  Description of Artificial Sequence: Synthetic epitope
SSGSTASNMP

SEQ ID NO: 47932 - protein, 10 aa, Artificial Sequence
  Description of Artificial Sequence: Synthetic epitope
SSGTASKMAP

SEQ ID NO: 47933 - protein, 10 aa, Artificial Sequence
  Description of Artificial Sequence: Synthetic epitope
SSGTKTTKQY

SEQ ID NO: 47934 - protein, 10 aa, Artificial Sequence
  Description of Artificial Sequence: Synthetic epitope
SSGTLSAFAS

SEQ ID NO: 47935 - protein, 10 aa, Artificial Sequence
  Description of Artificial Sequence: Synthetic epitope
SSGTSILTGS

SEQ ID NO: 47936 - protein, 10 aa, Artificial Sequence
  Description of Artificial Sequence: Synthetic epitope
SSGTSLSAMH

SEQ ID NO: 47937 - protein, 10 aa, Artificial Sequence
  Description of Artificial Sequence: Synthetic epitope
SSGTTASSLE

SEQ ID NO: 47938 - protein, 10 aa, Artificial Sequence
  Description of Artificial Sequence: Synthetic epitope
SSGTVISFGE

SEQ ID NO: 47939 - protein, 10 aa, Artificial Sequence
  Description of Artificial Sequence: Synthetic epitope
SSGVIPNEKI

SEQ ID NO: 47940 - protein, 10 aa, Artificial Sequence
  Description of Artificial Sequence: Synthetic epitope
SSGVIQEALA

SEQ ID NO: 47941 - protein, 10 aa, Artificial Sequence
  Description of Artificial Sequence: Synthetic epitope
SSGVKRTAKD

SEQ ID NO: 47942 - protein, 10 aa, Artificial Sequence
  Description of Artificial Sequence: Synthetic epitope
SSGYFAKKEA

SEQ ID NO: 47943 - protein, 10 aa, Artificial Sequence
  Description of Artificial Sequence: Synthetic epitope
SSHASLRADA

SEQ ID NO: 47944 - protein, 10 aa, Artificial Sequence
  Description of Artificial Sequence: Synthetic epitope
SSHEQARSSA

SEQ ID NO: 47945 - protein, 10 aa, Artificial Sequence
  Description of Artificial Sequence: Synthetic epitope
SSHGHVMSTG

SEQ ID NO: 47946 - protein, 10 aa, Artificial Sequence
  Description of Artificial Sequence: Synthetic epitope
SSHHKISNLS

SEQ ID NO: 47947 - protein, 10 aa, Artificial Sequence
  Description of Artificial Sequence: Synthetic epitope
SSHIAQEASP

SEQ ID NO: 47948 - protein, 10 aa, Artificial Sequence
  Description of Artificial Sequence: Synthetic epitope
SSHKATDTRT

SEQ ID NO: 47949 - protein, 10 aa, Artificial Sequence
  Description of Artificial Sequence: Synthetic epitope
SSHLKKLNRY

SEQ ID NO: 47950 - protein, 10 aa, Artificial Sequence
  Description of Artificial Sequence: Synthetic epitope
SSHLLEEATL

SEQ ID NO: 47951 - protein, 10 aa, Artificial Sequence
  Description of Artificial Sequence: Synthetic epitope
SSHNISDLDT

SEQ ID NO: 47952 - protein, 10 aa, Artificial Sequence
  Description of Artificial Sequence: Synthetic epitope
SSHNRYETVE

SEQ ID NO: 47953 - protein, 10 aa, Artificial Sequence
  Description of Artificial Sequence: Synthetic epitope
SSHNTVNEEL

SEQ ID NO: 47954 - protein, 10 aa, Artificial Sequence
  Description of Artificial Sequence: Synthetic epitope
SSHQETLDHI

SEQ ID NO: 47955 - protein, 10 aa, Artificial Sequence
  Description of Artificial Sequence: Synthetic epitope
SSHQVTEQQT

SEQ ID NO: 47956 - protein, 10 aa, Artificial Sequence
  Description of Artificial Sequence: Synthetic epitope
SSHSHNKQPK

SEQ ID NO: 47957 - protein, 10 aa, Artificial Sequence
  Description of Artificial Sequence: Synthetic epitope
SSHSLQIQHQ

SEQ ID NO: 47958 - protein, 10 aa, Artificial Sequence
  Description of Artificial Sequence: Synthetic epitope
SSHSQDKHHE

SEQ ID NO: 47959 - protein, 10 aa, Artificial Sequence
  Description of Artificial Sequence: Synthetic epitope
SSHSSLTERH

SEQ ID NO: 47960 - protein, 10 aa, Artificial Sequence
  Description of Artificial Sequence: Synthetic epitope
SSHTTAPTTV

SEQ ID NO: 47961 - protein, 10 aa, Artificial Sequence
  Description of Artificial Sequence: Synthetic epitope
SSHVAKAPSL

SEQ ID NO: 47962 - protein, 10 aa, Artificial Sequence
  Description of Artificial Sequence: Synthetic epitope
SSHVLEMKLT

SEQ ID NO: 47963 - protein, 10 aa, Artificial Sequence
  Description of Artificial Sequence: Synthetic epitope
SSIAAKNAEL

SEQ ID NO: 47964 - protein, 10 aa, Artificial Sequence
  Description of Artificial Sequence: Synthetic epitope
SSIALLAEAP

SEQ ID NO: 47965 - protein, 10 aa, Artificial Sequence
  Description of Artificial Sequence: Synthetic epitope
SSIASASTFF

SEQ ID NO: 47966 - protein, 10 aa, Artificial Sequence
  Description of Artificial Sequence: Synthetic epitope
SSIASTLGLK

SEQ ID NO: 47967 - protein, 10 aa, Artificial Sequence
  Description of Artificial Sequence: Synthetic epitope
SSIATTSYAQ

SEQ ID NO: 47968 - protein, 10 aa, Artificial Sequence
  Description of Artificial Sequence: Synthetic epitope
SSIDLQTLAE

SEQ ID NO: 47969 - protein, 10 aa, Artificial Sequence
  Description of Artificial Sequence: Synthetic epitope
SSIDPSLLST

SEQ ID NO: 47970 - protein, 10 aa, Artificial Sequence
  Description of Artificial Sequence: Synthetic epitope
SSIDQEESEQ

SEQ ID NO: 47971 - protein, 10 aa, Artificial Sequence
  Description of Artificial Sequence: Synthetic epitope
SSIDSISMRK

SEQ ID NO: 47972 - protein, 10 aa, Artificial Sequence
  Description of Artificial Sequence: Synthetic epitope
SSIDSSRKNK

SEQ ID NO: 47973 - protein, 10 aa, Artificial Sequence
  Description of Artificial Sequence: Synthetic epitope
SSIDVAKSLL

SEQ ID NO: 47974 - protein, 10 aa, Artificial Sequence
  Description of Artificial Sequence: Synthetic epitope
SSIEKAVPGP

SEQ ID NO: 47975 - protein, 10 aa, Artificial Sequence
  Description of Artificial Sequence: Synthetic epitope
SSIEQSQFSE

SEQ ID NO: 47976 - protein, 10 aa, Artificial Sequence
  Description of Artificial Sequence: Synthetic epitope
SSIESEAKPA

SEQ ID NO: 47977 - protein, 10 aa, Artificial Sequence
  Description of Artificial Sequence: Synthetic epitope
SSIFRGANPL

SEQ ID NO: 47978 - protein, 10 aa, Artificial Sequence
  Description of Artificial Sequence: Synthetic epitope
SSIGGTHKIG

SEQ ID NO: 47979 - protein, 10 aa, Artificial Sequence
  Description of Artificial Sequence: Synthetic epitope
SSIIKKASFE

SEQ ID NO: 47980 - protein, 10 aa, Artificial Sequence
  Description of Artificial Sequence: Synthetic epitope
SSIIQVMKGS

SEQ ID NO: 47981 - protein, 10 aa, Artificial Sequence
  Description of Artificial Sequence: Synthetic epitope
SSIISRKEKN

SEQ ID NO: 47982 - protein, 10 aa, Artificial Sequence
  Description of Artificial Sequence: Synthetic epitope
SSIIYSSQED

SEQ ID NO: 47983 - protein, 10 aa, Artificial Sequence
  Description of Artificial Sequence: Synthetic epitope
SSIKELTQLT

SEQ ID NO: 47984 - protein, 10 aa, Artificial Sequence
  Description of Artificial Sequence: Synthetic epitope
SSIKIVRHII

SEQ ID NO: 47985 - protein, 10 aa, Artificial Sequence
  Description of Artificial Sequence: Synthetic epitope
SSIKSDNVTR

SEQ ID NO: 47986 - protein, 10 aa, Artificial Sequence
  Description of Artificial Sequence: Synthetic epitope
SSIKVESLLT

SEQ ID NO: 47987 - protein, 10 aa, Artificial Sequence
  Description of Artificial Sequence: Synthetic epitope
SSILKGMELS

SEQ ID NO: 47988 - protein, 10 aa, Artificial Sequence
  Description of Artificial Sequence: Synthetic epitope
SSILNSAMQQ

SEQ ID NO: 47989 - protein, 10 aa, Artificial Sequence
  Description of Artificial Sequence: Synthetic epitope
SSINLAASPA

SEQ ID NO: 47990 - protein, 10 aa, Artificial Sequence
  Description of Artificial Sequence: Synthetic epitope
SSIPKNIQSL

SEQ ID NO: 47991 - protein, 10 aa, Artificial Sequence
  Description of Artificial Sequence: Synthetic epitope
SSIQGVAPDG

SEQ ID NO: 47992 - protein, 10 aa, Artificial Sequence
  Description of Artificial Sequence: Synthetic epitope
SSIQKAPIAF

SEQ ID NO: 47993 - protein, 10 aa, Artificial Sequence
  Description of Artificial Sequence: Synthetic epitope
SSIQKLVISH

SEQ ID NO: 47994 - protein, 10 aa, Artificial Sequence
  Description of Artificial Sequence: Synthetic epitope
SSIRASNYNV

SEQ ID NO: 47995 - protein, 10 aa, Artificial Sequence
  Description of Artificial Sequence: Synthetic epitope
SSIRNTSIHD

SEQ ID NO: 47996 - protein, 10 aa, Artificial Sequence
  Description of Artificial Sequence: Synthetic epitope
SSIRQRISSF

SEQ ID NO: 47997 - protein, 10 aa, Artificial Sequence
  Description of Artificial Sequence: Synthetic epitope
SSISAALEDS

SEQ ID NO: 47998 - protein, 10 aa, Artificial Sequence
  Description of Artificial Sequence: Synthetic epitope
SSISAEEQFE

SEQ ID NO: 47999 - protein, 10 aa, Artificial Sequence
  Description of Artificial Sequence: Synthetic epitope
SSISKKDQIM

SEQ ID NO: 48000 - protein, 10 aa, Artificial Sequence
  Description of Artificial Sequence: Synthetic epitope
SSISTEINSA

SEQ ID NO: 48001 - protein, 10 aa, Artificial Sequence
  Description of Artificial Sequence: Synthetic epitope
SSISYVSEGT

SEQ ID NO: 48002 - protein, 10 aa, Artificial Sequence
  Description of Artificial Sequence: Synthetic epitope
SSITKSQGSE

SEQ ID NO: 48003 - protein, 10 aa, Artificial Sequence
  Description of Artificial Sequence: Synthetic epitope
SSITSANSVD

SEQ ID NO: 48004 - protein, 10 aa, Artificial Sequence
  Description of Artificial Sequence: Synthetic epitope
SSITSNKALR

SEQ ID NO: 48005 - protein, 10 aa, Artificial Sequence
  Description of Artificial Sequence: Synthetic epitope
SSITSSLAAT

SEQ ID NO: 48006 - protein, 10 aa, Artificial Sequence
  Description of Artificial Sequence: Synthetic epitope
SSITSVADIR

SEQ ID NO: 48007 - protein, 10 aa, Artificial Sequence
  Description of Artificial Sequence: Synthetic epitope
SSITTDAKGQ

SEQ ID NO: 48008 - protein, 10 aa, Artificial Sequence
  Description of Artificial Sequence: Synthetic epitope
SSITTKFGDS

SEQ ID NO: 48009 - protein, 10 aa, Artificial Sequence
  Description of Artificial Sequence: Synthetic epitope
SSIVEELLDQ

SEQ ID NO: 48010 - protein, 10 aa, Artificial Sequence
  Description of Artificial Sequence: Synthetic epitope
SSIVKLSGDI

SEQ ID NO: 48011 - protein, 10 aa, Artificial Sequence
  Description of Artificial Sequence: Synthetic epitope
SSIWESLSKN

SEQ ID NO: 48012 - protein, 10 aa, Artificial Sequence
  Description of Artificial Sequence: Synthetic epitope
SSKALGKNKK

SEQ ID NO: 48013 - protein, 10 aa, Artificial Sequence
  Description of Artificial Sequence: Synthetic epitope
SSKASGSALG

SEQ ID NO: 48014 - protein, 10 aa, Artificial Sequence
  Description of Artificial Sequence: Synthetic epitope
SSKASGSKQQ

SEQ ID NO: 48015 - protein, 10 aa, Artificial Sequence
  Description of Artificial Sequence: Synthetic epitope
SSKASQDRKL

SEQ ID NO: 48016 - protein, 10 aa, Artificial Sequence
  Description of Artificial Sequence: Synthetic epitope
SSKDQARQAL

SEQ ID NO: 48017 - protein, 10 aa, Artificial Sequence
  Description of Artificial Sequence: Synthetic epitope
SSKDSRSQLI

SEQ ID NO: 48018 - protein, 10 aa, Artificial Sequence
  Description of Artificial Sequence: Synthetic epitope
SSKDSSPTLA

SEQ ID NO: 48019 - protein, 10 aa, Artificial Sequence
  Description of Artificial Sequence: Synthetic epitope
SSKDSVQHQG

SEQ ID NO: 48020 - protein, 10 aa, Artificial Sequence
  Description of Artificial Sequence: Synthetic epitope
SSKDTASKPS

SEQ ID NO: 48021 - protein, 10 aa, Artificial Sequence
  Description of Artificial Sequence: Synthetic epitope
SSKEDDTDEE

SEQ ID NO: 48022 - protein, 10 aa, Artificial Sequence
  Description of Artificial Sequence: Synthetic epitope
SSKEEKKLSN

SEQ ID NO: 48023 - protein, 10 aa, Artificial Sequence
  Description of Artificial Sequence: Synthetic epitope
SSKEGELDAR

SEQ ID NO: 48024 - protein, 10 aa, Artificial Sequence
  Description of Artificial Sequence: Synthetic epitope
SSKEKNTKTV

SEQ ID NO: 48025 - protein, 10 aa, Artificial Sequence
  Description of Artificial Sequence: Synthetic epitope
SSKEQQARKK

SEQ ID NO: 48026 - protein, 10 aa, Artificial Sequence
  Description of Artificial Sequence: Synthetic epitope
SSKESEELLK

SEQ ID NO: 48027 - protein, 10 aa, Artificial Sequence
  Description of Artificial Sequence: Synthetic epitope
SSKESLVRTS

SEQ ID NO: 48028 - protein, 10 aa, Artificial Sequence
  Description of Artificial Sequence: Synthetic epitope
SSKETSALEA

SEQ ID NO: 48029 - protein, 10 aa, Artificial Sequence
  Description of Artificial Sequence: Synthetic epitope
SSKFFSAYKS

SEQ ID NO: 48030 - protein, 10 aa, Artificial Sequence
  Description of Artificial Sequence: Synthetic epitope
SSKFNISIEP

SEQ ID NO: 48031 - protein, 10 aa, Artificial Sequence
  Description of Artificial Sequence: Synthetic epitope
SSKGIMEEDE

SEQ ID NO: 48032 - protein, 10 aa, Artificial Sequence
  Description of Artificial Sequence: Synthetic epitope
SSKGKVVEMQ

SEQ ID NO: 48033 - protein, 10 aa, Artificial Sequence
  Description of Artificial Sequence: Synthetic epitope
SSKGRSLIGK

SEQ ID NO: 48034 - protein, 10 aa, Artificial Sequence
  Description of Artificial Sequence: Synthetic epitope
SSKGVDIKKV

SEQ ID NO: 48035 - protein, 10 aa, Artificial Sequence
  Description of Artificial Sequence: Synthetic epitope
SSKHKRFDLG

SEQ ID NO: 48036 - protein, 10 aa, Artificial Sequence
  Description of Artificial Sequence: Synthetic epitope
SSKHTVAEHT

SEQ ID NO: 48037 - protein, 10 aa, Artificial Sequence
  Description of Artificial Sequence: Synthetic epitope
SSKIEDNANN

SEQ ID NO: 48038 - protein, 10 aa, Artificial Sequence
  Description of Artificial Sequence: Synthetic epitope
SSKIQVSKLE

SEQ ID NO: 48039 - protein, 10 aa, Artificial Sequence
  Description of Artificial Sequence: Synthetic epitope
SSKIRSSREH

SEQ ID NO: 48040 - protein, 10 aa, Artificial Sequence
  Description of Artificial Sequence: Synthetic epitope
SSKKAEKEAK

SEQ ID NO: 48041 - protein, 10 aa, Artificial Sequence
  Description of Artificial Sequence: Synthetic epitope
SSKKDDKMKE

SEQ ID NO: 48042 - protein, 10 aa, Artificial Sequence
  Description of Artificial Sequence: Synthetic epitope
SSKKITEFDP

SEQ ID NO: 48043 - protein, 10 aa, Artificial Sequence
  Description of Artificial Sequence: Synthetic epitope
SSKKQILDSD

SEQ ID NO: 48044 - protein, 10 aa, Artificial Sequence
  Description of Artificial Sequence: Synthetic epitope
SSKKRSNGLS

SEQ ID NO: 48045 - protein, 10 aa, Artificial Sequence
  Description of Artificial Sequence: Synthetic epitope
SSKKSKEQKA

SEQ ID NO: 48046 - protein, 10 aa, Artificial Sequence
  Description of Artificial Sequence: Synthetic epitope
SSKLATFSEI

SEQ ID NO: 48047 - protein, 10 aa, Artificial Sequence
  Description of Artificial Sequence: Synthetic epitope
SSKLATGVGL

SEQ ID NO: 48048 - protein, 10 aa, Artificial Sequence
  Description of Artificial Sequence: Synthetic epitope
SSKLKSAQQE

SEQ ID NO: 48049 - protein, 10 aa, Artificial Sequence
  Description of Artificial Sequence: Synthetic epitope
SSKLKVMQTD

SEQ ID NO: 48050 - protein, 10 aa, Artificial Sequence
  Description of Artificial Sequence: Synthetic epitope
SSKLLKSPKE

SEQ ID NO: 48051 - protein, 10 aa, Artificial Sequence
  Description of Artificial Sequence: Synthetic epitope
SSKLLVKTVL

SEQ ID NO: 48052 - protein, 10 aa, Artificial Sequence
  Description of Artificial Sequence: Synthetic epitope
SSKLMAVNVT

SEQ ID NO: 48053 - protein, 10 aa, Artificial Sequence
  Description of Artificial Sequence: Synthetic epitope
SSKLNEEDEV

SEQ ID NO: 48054 - protein, 10 aa, Artificial Sequence
  Description of Artificial Sequence: Synthetic epitope
SSKLQALFAH

SEQ ID NO: 48055 - protein, 10 aa, Artificial Sequence
  Description of Artificial Sequence: Synthetic epitope
SSKLSEKSGL

SEQ ID NO: 48056 - protein, 10 aa, Artificial Sequence
  Description of Artificial Sequence: Synthetic epitope
SSKLSKIEFE

SEQ ID NO: 48057 - protein, 10 aa, Artificial Sequence
  Description of Artificial Sequence: Synthetic epitope
SSKLTASRKS

SEQ ID NO: 48058 - protein, 10 aa, Artificial Sequence
  Description of Artificial Sequence: Synthetic epitope
SSKMKSPDWL

SEQ ID NO: 48059 - protein, 10 aa, Artificial Sequence
  Description of Artificial Sequence: Synthetic epitope
SSKMKVVASR

SEQ ID NO: 48060 - protein, 10 aa, Artificial Sequence
  Description of Artificial Sequence: Synthetic epitope
SSKMVISEPG

SEQ ID NO: 48061 - protein, 10 aa, Artificial Sequence
  Description of Artificial Sequence: Synthetic epitope
SSKMVSAEIS

SEQ ID NO: 48062 - protein, 10 aa, Artificial Sequence
  Description of Artificial Sequence: Synthetic epitope
SSKNEDASNS

SEQ ID NO: 48063 - protein, 10 aa, Artificial Sequence
  Description of Artificial Sequence: Synthetic epitope
SSKNIKSPRY

SEQ ID NO: 48064 - protein, 10 aa, Artificial Sequence
  Description of Artificial Sequence: Synthetic epitope
SSKNKDPITI

SEQ ID NO: 48065 - protein, 10 aa, Artificial Sequence
  Description of Artificial Sequence: Synthetic epitope
SSKNKSRLTS

SEQ ID NO: 48066 - protein, 10 aa, Artificial Sequence
  Description of Artificial Sequence: Synthetic epitope
SSKNVKEDYD

SEQ ID NO: 48067 - protein, 10 aa, Artificial Sequence
  Description of Artificial Sequence: Synthetic epitope
SSKPAIGSKA

SEQ ID NO: 48068 - protein, 10 aa, Artificial Sequence
  Description of Artificial Sequence: Synthetic epitope
SSKPASNPKF

SEQ ID NO: 48069 - protein, 10 aa, Artificial Sequence
  Description of Artificial Sequence: Synthetic epitope
SSKPFVVSAR

SEQ ID NO: 48070 - protein, 10 aa, Artificial Sequence
  Description of Artificial Sequence: Synthetic epitope
SSKPSALVKN

SEQ ID NO: 48071 - protein, 10 aa, Artificial Sequence
  Description of Artificial Sequence: Synthetic epitope
SSKPSIKAVI

SEQ ID NO: 48072 - protein, 10 aa, Artificial Sequence
  Description of Artificial Sequence: Synthetic epitope
SSKPSSFTEK

SEQ ID NO: 48073 - protein, 10 aa, Artificial Sequence
  Description of Artificial Sequence: Synthetic epitope
SSKPTSNRRT

SEQ ID NO: 48074 - protein, 10 aa, Artificial Sequence
  Description of Artificial Sequence: Synthetic epitope
SSKPYTEAAS

SEQ ID NO: 48075 - protein, 10 aa, Artificial Sequence
  Description of Artificial Sequence: Synthetic epitope
SSKQASLELG

SEQ ID NO: 48076 - protein, 10 aa, Artificial Sequence
  Description of Artificial Sequence: Synthetic epitope
SSKQTVIQEL

SEQ ID NO: 48077 - protein, 10 aa, Artificial Sequence
  Description of Artificial Sequence: Synthetic epitope
SSKRAEAPQG

SEQ ID NO: 48078 - protein, 10 aa, Artificial Sequence
  Description of Artificial Sequence: Synthetic epitope
SSKRDGTSSQ

SEQ ID NO: 48079 - protein, 10 aa, Artificial Sequence
  Description of Artificial Sequence: Synthetic epitope
SSKRSLLSRK

SEQ ID NO: 48080 - protein, 10 aa, Artificial Sequence
  Description of Artificial Sequence: Synthetic epitope
SSKSAMMYIQ

SEQ ID NO: 48081 - protein, 10 aa, Artificial Sequence
  Description of Artificial Sequence: Synthetic epitope
SSKSEKREPV

SEQ ID NO: 48082 - protein, 10 aa, Artificial Sequence
  Description of Artificial Sequence: Synthetic epitope
SSKSESRLKH

SEQ ID NO: 48083 - protein, 10 aa, Artificial Sequence
  Description of Artificial Sequence: Synthetic epitope
SSKSGPVIAK

SEQ ID NO: 48084 - protein, 10 aa, Artificial Sequence
  Description of Artificial Sequence: Synthetic epitope
SSKSGSMKDR

SEQ ID NO: 48085 - protein, 10 aa, Artificial Sequence
  Description of Artificial Sequence: Synthetic epitope
SSKSLELKVA

SEQ ID NO: 48086 - protein, 10 aa, Artificial Sequence
  Description of Artificial Sequence: Synthetic epitope
SSKSLSLAGR

SEQ ID NO: 48087 - protein, 10 aa, Artificial Sequence
  Description of Artificial Sequence: Synthetic epitope
SSKSLTKLSP

SEQ ID NO: 48088 - protein, 10 aa, Artificial Sequence
  Description of Artificial Sequence: Synthetic epitope
SSKSQPSAKV

SEQ ID NO: 48089 - protein, 10 aa, Artificial Sequence
  Description of Artificial Sequence: Synthetic epitope
SSKTEKKDKV

SEQ ID NO: 48090 - protein, 10 aa, Artificial Sequence
  Description of Artificial Sequence: Synthetic epitope
SSKTFIAMGV

SEQ ID NO: 48091 - protein, 10 aa, Artificial Sequence
  Description of Artificial Sequence: Synthetic epitope
SSKTKPVLSS

SEQ ID NO: 48092 - protein, 10 aa, Artificial Sequence
  Description of Artificial Sequence: Synthetic epitope
SSKTLKAEGF

SEQ ID NO: 48093 - protein, 10 aa, Artificial Sequence
  Description of Artificial Sequence: Synthetic epitope
SSKTLRATAS

SEQ ID NO: 48094 - protein, 10 aa, Artificial Sequence
  Description of Artificial Sequence: Synthetic epitope
SSKTNAILSR

SEQ ID NO: 48095 - protein, 10 aa, Artificial Sequence
  Description of Artificial Sequence: Synthetic epitope
SSKTNTLDMQ

SEQ ID NO: 48096 - protein, 10 aa, Artificial Sequence
  Description of Artificial Sequence: Synthetic epitope
SSKTTAKLST

SEQ ID NO: 48097 - protein, 10 aa, Artificial Sequence
  Description of Artificial Sequence: Synthetic epitope
SSKTTNLPTS

SEQ ID NO: 48098 - protein, 10 aa, Artificial Sequence
  Description of Artificial Sequence: Synthetic epitope
SSKTTRVNEN

SEQ ID NO: 48099 - protein, 10 aa, Artificial Sequence
  Description of Artificial Sequence: Synthetic epitope
SSKVDASLSE

SEQ ID NO: 48100 - protein, 10 aa, Artificial Sequence
  Description of Artificial Sequence: Synthetic epitope
SSKVKAKTIV

SEQ ID NO: 48101 - protein, 10 aa, Artificial Sequence
  Description of Artificial Sequence: Synthetic epitope
SSKVNENSLG

SEQ ID NO: 48102 - protein, 10 aa, Artificial Sequence
  Description of Artificial Sequence: Synthetic epitope
SSKVPNLLST

SEQ ID NO: 48103 - protein, 10 aa, Artificial Sequence
  Description of Artificial Sequence: Synthetic epitope
SSKVRTSSDM

SEQ ID NO: 48104 - protein, 10 aa, Artificial Sequence
  Description of Artificial Sequence: Synthetic epitope
SSKVSGAQEM

SEQ ID NO: 48105 - protein, 10 aa, Artificial Sequence
  Description of Artificial Sequence: Synthetic epitope
SSKVSSHAQM

SEQ ID NO: 48106 - protein, 10 aa, Artificial Sequence
  Description of Artificial Sequence: Synthetic epitope
SSKVSSQRAE

SEQ ID NO: 48107 - protein, 10 aa, Artificial Sequence
  Description of Artificial Sequence: Synthetic epitope
SSKYDELKKS

SEQ ID NO: 48108 - protein, 10 aa, Artificial Sequence
  Description of Artificial Sequence: Synthetic epitope
SSLAAKASLG

SEQ ID NO: 48109 - protein, 10 aa, Artificial Sequence
  Description of Artificial Sequence: Synthetic epitope
SSLADTQQRE

SEQ ID NO: 48110 - protein, 10 aa, Artificial Sequence
  Description of Artificial Sequence: Synthetic epitope
SSLAEEAARA

SEQ ID NO: 48111 - protein, 10 aa, Artificial Sequence
  Description of Artificial Sequence: Synthetic epitope
SSLAKRSNFR

SEQ ID NO: 48112 - protein, 10 aa, Artificial Sequence
  Description of Artificial Sequence: Synthetic epitope
SSLAKVSSKK

SEQ ID NO: 48113 - protein, 10 aa, Artificial Sequence
  Description of Artificial Sequence: Synthetic epitope
SSLALKFLTT

SEQ ID NO: 48114 - protein, 10 aa, Artificial Sequence
  Description of Artificial Sequence: Synthetic epitope
SSLAMLDLLH

SEQ ID NO: 48115 - protein, 10 aa, Artificial Sequence
  Description of Artificial Sequence: Synthetic epitope
SSLAQSVMSM

SEQ ID NO: 48116 - protein, 10 aa, Artificial Sequence
  Description of Artificial Sequence: Synthetic epitope
SSLASLSRYL

SEQ ID NO: 48117 - protein, 10 aa, Artificial Sequence
  Description of Artificial Sequence: Synthetic epitope
SSLAVSTHPD

SEQ ID NO: 48118 - protein, 10 aa, Artificial Sequence
  Description of Artificial Sequence: Synthetic epitope
SSLDALDADS

SEQ ID NO: 48119 - protein, 10 aa, Artificial Sequence
  Description of Artificial Sequence: Synthetic epitope
SSLDGAAVAV

SEQ ID NO: 48120 - protein, 10 aa, Artificial Sequence
  Description of Artificial Sequence: Synthetic epitope
SSLDILSSLN

SEQ ID NO: 48121 - protein, 10 aa, Artificial Sequence
  Description of Artificial Sequence: Synthetic epitope
SSLDRATRTI

SEQ ID NO: 48122 - protein, 10 aa, Artificial Sequence
  Description of Artificial Sequence: Synthetic epitope
SSLDRLYSRK

SEQ ID NO: 48123 - protein, 10 aa, Artificial Sequence
  Description of Artificial Sequence: Synthetic epitope
SSLDSIKADG

SEQ ID NO: 48124 - protein, 10 aa, Artificial Sequence
  Description of Artificial Sequence: Synthetic epitope
SSLDSITEET

SEQ ID NO: 48125 - protein, 10 aa, Artificial Sequence
  Description of Artificial Sequence: Synthetic epitope
SSLDTEASRA

SEQ ID NO: 48126 - protein, 10 aa, Artificial Sequence
  Description of Artificial Sequence: Synthetic epitope
SSLDTKLSTL

SEQ ID NO: 48127 - protein, 10 aa, Artificial Sequence
  Description of Artificial Sequence: Synthetic epitope
SSLDTSTHKS

SEQ ID NO: 48128 - protein, 10 aa, Artificial Sequence
  Description of Artificial Sequence: Synthetic epitope
SSLDVSLQKK

SEQ ID NO: 48129 - protein, 10 aa, Artificial Sequence
  Description of Artificial Sequence: Synthetic epitope
SSLEETSVSE

SEQ ID NO: 48130 - protein, 10 aa, Artificial Sequence
  Description of Artificial Sequence: Synthetic epitope
SSLELLASLT

SEQ ID NO: 48131 - protein, 10 aa, Artificial Sequence
  Description of Artificial Sequence: Synthetic epitope
SSLENANYKD

SEQ ID NO: 48132 - protein, 10 aa, Artificial Sequence
  Description of Artificial Sequence: Synthetic epitope
SSLENMSVQD

SEQ ID NO: 48133 - protein, 10 aa, Artificial Sequence
  Description of Artificial Sequence: Synthetic epitope
SSLEQEKKTE

SEQ ID NO: 48134 - protein, 10 aa, Artificial Sequence
  Description of Artificial Sequence: Synthetic epitope
SSLEQQNTEL

SEQ ID NO: 48135 - protein, 10 aa, Artificial Sequence
  Description of Artificial Sequence: Synthetic epitope
SSLESLASAQ

SEQ ID NO: 48136 - protein, 10 aa, Artificial Sequence
  Description of Artificial Sequence: Synthetic epitope
SSLESLQTAV

SEQ ID NO: 48137 - protein, 10 aa, Artificial Sequence
  Description of Artificial Sequence: Synthetic epitope
SSLESMQLSL

SEQ ID NO: 48138 - protein, 10 aa, Artificial Sequence
  Description of Artificial Sequence: Synthetic epitope
SSLESPPASR

SEQ ID NO: 48139 - protein, 10 aa, Artificial Sequence
  Description of Artificial Sequence: Synthetic epitope
SSLESVADET

SEQ ID NO: 48140 - protein, 10 aa, Artificial Sequence
  Description of Artificial Sequence: Synthetic epitope
SSLETATDNL

SEQ ID NO: 48141 - protein, 10 aa, Artificial Sequence
  Description of Artificial Sequence: Synthetic epitope
SSLEVELAAK

SEQ ID NO: 48142 - protein, 10 aa, Artificial Sequence
  Description of Artificial Sequence: Synthetic epitope
SSLEYRASSR

SEQ ID NO: 48143 - protein, 10 aa, Artificial Sequence
  Description of Artificial Sequence: Synthetic epitope
SSLGNATSDE

SEQ ID NO: 48144 - protein, 10 aa, Artificial Sequence
  Description of Artificial Sequence: Synthetic epitope
SSLGNKLQTL

SEQ ID NO: 48145 - protein, 10 aa, Artificial Sequence
  Description of Artificial Sequence: Synthetic epitope
SSLGTELSTT

SEQ ID NO: 48146 - protein, 10 aa, Artificial Sequence
  Description of Artificial Sequence: Synthetic epitope
SSLHKRSGTD

SEQ ID NO: 48147 - protein, 10 aa, Artificial Sequence
  Description of Artificial Sequence: Synthetic epitope
SSLIEQAPIP

SEQ ID NO: 48148 - protein, 10 aa, Artificial Sequence
  Description of Artificial Sequence: Synthetic epitope
SSLIKTSDKP

SEQ ID NO: 48149 - protein, 10 aa, Artificial Sequence
  Description of Artificial Sequence: Synthetic epitope
SSLILGGPEE

SEQ ID NO: 48150 - protein, 10 aa, Artificial Sequence
  Description of Artificial Sequence: Synthetic epitope
SSLKATAIDQ

SEQ ID NO: 48151 - protein, 10 aa, Artificial Sequence
  Description of Artificial Sequence: Synthetic epitope
SSLKLNVYEE

SEQ ID NO: 48152 - protein, 10 aa, Artificial Sequence
  Description of Artificial Sequence: Synthetic epitope
SSLKMNKSYL

SEQ ID NO: 48153 - protein, 10 aa, Artificial Sequence
  Description of Artificial Sequence: Synthetic epitope
SSLKSRGSVH

SEQ ID NO: 48154 - protein, 10 aa, Artificial Sequence
  Description of Artificial Sequence: Synthetic epitope
SSLKTSADGA

SEQ ID NO: 48155 - protein, 10 aa, Artificial Sequence
  Description of Artificial Sequence: Synthetic epitope
SSLLAAMMQQ

SEQ ID NO: 48156 - protein, 10 aa, Artificial Sequence
  Description of Artificial Sequence: Synthetic epitope
SSLLELASTT

SEQ ID NO: 48157 - protein, 10 aa, Artificial Sequence
  Description of Artificial Sequence: Synthetic epitope
SSLLPQSKKS

SEQ ID NO: 48158 - protein, 10 aa, Artificial Sequence
  Description of Artificial Sequence: Synthetic epitope
SSLLQKSKAD

SEQ ID NO: 48159 - protein, 10 aa, Artificial Sequence
  Description of Artificial Sequence: Synthetic epitope
SSLLSLLRSE

SEQ ID NO: 48160 - protein, 10 aa, Artificial Sequence
  Description of Artificial Sequence: Synthetic epitope
SSLLTQTSEE

SEQ ID NO: 48161 - protein, 10 aa, Artificial Sequence
  Description of Artificial Sequence: Synthetic epitope
SSLLTSEKST

SEQ ID NO: 48162 - protein, 10 aa, Artificial Sequence
  Description of Artificial Sequence: Synthetic epitope
SSLMLDISDL

SEQ ID NO: 48163 - protein, 10 aa, Artificial Sequence
  Description of Artificial Sequence: Synthetic epitope
SSLNEASSGL

SEQ ID NO: 48164 - protein, 10 aa, Artificial Sequence
  Description of Artificial Sequence: Synthetic epitope
SSLNIMRNLV

SEQ ID NO: 48165 - protein, 10 aa, Artificial Sequence
  Description of Artificial Sequence: Synthetic epitope
SSLNLAEAMR

SEQ ID NO: 48166 - protein, 10 aa, Artificial Sequence
  Description of Artificial Sequence: Synthetic epitope
SSLNLLDTSF

SEQ ID NO: 48167 - protein, 10 aa, Artificial Sequence
  Description of Artificial Sequence: Synthetic epitope
SSLNLNSAYK

SEQ ID NO: 48168 - protein, 10 aa, Artificial Sequence
  Description of Artificial Sequence: Synthetic epitope
SSLPALTSSA

SEQ ID NO: 48169 - protein, 10 aa, Artificial Sequence
  Description of Artificial Sequence: Synthetic epitope
SSLPKTNPTH

SEQ ID NO: 48170 - protein, 10 aa, Artificial Sequence
  Description of Artificial Sequence: Synthetic epitope
SSLPSQLSIK

SEQ ID NO: 48171 - protein, 10 aa, Artificial Sequence
  Description of Artificial Sequence: Synthetic epitope
SSLPSSKLIR

SEQ ID NO: 48172 - protein, 10 aa, Artificial Sequence
  Description of Artificial Sequence: Synthetic epitope
SSLPSTADPS

SEQ ID NO: 48173 - protein, 10 aa, Artificial Sequence
  Description of Artificial Sequence: Synthetic epitope
SSLQASAREE

SEQ ID NO: 48174 - protein, 10 aa, Artificial Sequence
  Description of Artificial Sequence: Synthetic epitope
SSLQKERKEG

SEQ ID NO: 48175 - protein, 10 aa, Artificial Sequence
  Description of Artificial Sequence: Synthetic epitope
SSLQQEITIL

SEQ ID NO: 48176 - protein, 10 aa, Artificial Sequence
  Description of Artificial Sequence: Synthetic epitope
SSLQSIDVES

SEQ ID NO: 48177 - protein, 10 aa, Artificial Sequence
  Description of Artificial Sequence: Synthetic epitope
SSLQSSVVEA

SEQ ID NO: 48178 - protein, 10 aa, Artificial Sequence
  Description of Artificial Sequence: Synthetic epitope
SSLRINHANH

SEQ ID NO: 48179 - protein, 10 aa, Artificial Sequence
  Description of Artificial Sequence: Synthetic epitope
SSLRLSTLQL

SEQ ID NO: 48180 - protein, 10 aa, Artificial Sequence
  Description of Artificial Sequence: Synthetic epitope
SSLRLTRSSD

SEQ ID NO: 48181 - protein, 10 aa, Artificial Sequence
  Description of Artificial Sequence: Synthetic epitope
SSLRSEATPR

SEQ ID NO: 48182 - protein, 10 aa, Artificial Sequence
  Description of Artificial Sequence: Synthetic epitope
SSLSAANTSQ

SEQ ID NO: 48183 - protein, 10 aa, Artificial Sequence
  Description of Artificial Sequence: Synthetic epitope
SSLSAAVGTE

SEQ ID NO: 48184 - protein, 10 aa, Artificial Sequence
  Description of Artificial Sequence: Synthetic epitope
SSLSAEAIRQ

SEQ ID NO: 48185 - protein, 10 aa, Artificial Sequence
  Description of Artificial Sequence: Synthetic epitope
SSLSAHAALS

SEQ ID NO: 48186 - protein, 10 aa, Artificial Sequence
  Description of Artificial Sequence: Synthetic epitope
SSLSALLAKA

SEQ ID NO: 48187 - protein, 10 aa, Artificial Sequence
  Description of Artificial Sequence: Synthetic epitope
SSLSARMMSG

SEQ ID NO: 48188 - protein, 10 aa, Artificial Sequence
  Description of Artificial Sequence: Synthetic epitope
SSLSASEYLY

SEQ ID NO: 48189 - protein, 10 aa, Artificial Sequence
  Description of Artificial Sequence: Synthetic epitope
SSLSDVTTVM

SEQ ID NO: 48190 - protein, 10 aa, Artificial Sequence
  Description of Artificial Sequence: Synthetic epitope
SSLSEKNVSE

SEQ ID NO: 48191 - protein, 10 aa, Artificial Sequence
  Description of Artificial Sequence: Synthetic epitope
SSLSETVFDH

SEQ ID NO: 48192 - protein, 10 aa, Artificial Sequence
  Description of Artificial Sequence: Synthetic epitope
SSLSKTSGDL

SEQ ID NO: 48193 - protein, 10 aa, Artificial Sequence
  Description of Artificial Sequence: Synthetic epitope
SSLSLASQKD

SEQ ID NO: 48194 - protein, 10 aa, Artificial Sequence
  Description of Artificial Sequence: Synthetic epitope
SSLSQDQAAT

SEQ ID NO: 48195 - protein, 10 aa, Artificial Sequence
  Description of Artificial Sequence: Synthetic epitope
SSLSQGRIKT

SEQ ID NO: 48196 - protein, 10 aa, Artificial Sequence
  Description of Artificial Sequence: Synthetic epitope
SSLSRMKTIF

SEQ ID NO: 48197 - protein, 10 aa, Artificial Sequence
  Description of Artificial Sequence: Synthetic epitope
SSLSSKTRTD

SEQ ID NO: 48198 - protein, 10 aa, Artificial Sequence
  Description of Artificial Sequence: Synthetic epitope
SSLSSLVRLN

SEQ ID NO: 48199 - protein, 10 aa, Artificial Sequence
  Description of Artificial Sequence: Synthetic epitope
SSLSSPIAAP

SEQ ID NO: 48200 - protein, 10 aa, Artificial Sequence
  Description of Artificial Sequence: Synthetic epitope
SSLSTVSRTL

SEQ ID NO: 48201 - protein, 10 aa, Artificial Sequence
  Description of Artificial Sequence: Synthetic epitope
SSLTADNLEK

SEQ ID NO: 48202 - protein, 10 aa, Artificial Sequence
  Description of Artificial Sequence: Synthetic epitope
SSLTANMKEV

SEQ ID NO: 48203 - protein, 10 aa, Artificial Sequence
  Description of Artificial Sequence: Synthetic epitope
SSLTATKQLH

SEQ ID NO: 48204 - protein, 10 aa, Artificial Sequence
  Description of Artificial Sequence: Synthetic epitope
SSLTERADTG

SEQ ID NO: 48205 - protein, 10 aa, Artificial Sequence
  Description of Artificial Sequence: Synthetic epitope
SSLTFMSTSA

SEQ ID NO: 48206 - protein, 10 aa, Artificial Sequence
  Description of Artificial Sequence: Synthetic epitope
SSLTQSAPAS

SEQ ID NO: 48207 - protein, 10 aa, Artificial Sequence
  Description of Artificial Sequence: Synthetic epitope
SSLTSAEVQL

SEQ ID NO: 48208 - protein, 10 aa, Artificial Sequence
  Description of Artificial Sequence: Synthetic epitope
SSLTSAPAPM

SEQ ID NO: 48209 - protein, 10 aa, Artificial Sequence
  Description of Artificial Sequence: Synthetic epitope
SSLVAELQEK

SEQ ID NO: 48210 - protein, 10 aa, Artificial Sequence
  Description of Artificial Sequence: Synthetic epitope
SSLVAENQGF

SEQ ID NO: 48211 - protein, 10 aa, Artificial Sequence
  Description of Artificial Sequence: Synthetic epitope
SSLVKLNSLT

SEQ ID NO: 48212 - protein, 10 aa, Artificial Sequence
  Description of Artificial Sequence: Synthetic epitope
SSLVSAAQRA

SEQ ID NO: 48213 - protein, 10 aa, Artificial Sequence
  Description of Artificial Sequence: Synthetic epitope
SSLVSLSGLG

SEQ ID NO: 48214 - protein, 10 aa, Artificial Sequence
  Description of Artificial Sequence: Synthetic epitope
SSLVSVRSKQ

SEQ ID NO: 48215 - protein, 10 aa, Artificial Sequence
  Description of Artificial Sequence: Synthetic epitope
SSLVSYLGSI

SEQ ID NO: 48216 - protein, 10 aa, Artificial Sequence
  Description of Artificial Sequence: Synthetic epitope
SSLYTSTASE

SEQ ID NO: 48217 - protein, 10 aa, Artificial Sequence
  Description of Artificial Sequence: Synthetic epitope
SSMADRSSRL

SEQ ID NO: 48218 - protein, 10 aa, Artificial Sequence
  Description of Artificial Sequence: Synthetic epitope
SSMAERYYNE

SEQ ID NO: 48219 - protein, 10 aa, Artificial Sequence
  Description of Artificial Sequence: Synthetic epitope
SSMAKAMSRL

SEQ ID NO: 48220 - protein, 10 aa, Artificial Sequence
  Description of Artificial Sequence: Synthetic epitope
SSMARTGESS

SEQ ID NO: 48221 - protein, 10 aa, Artificial Sequence
  Description of Artificial Sequence: Synthetic epitope
SSMDLIRPRV

SEQ ID NO: 48222 - protein, 10 aa, Artificial Sequence
  Description of Artificial Sequence: Synthetic epitope
SSMEDASEVI

SEQ ID NO: 48223 - protein, 10 aa, Artificial Sequence
  Description of Artificial Sequence: Synthetic epitope
SSMENKAKSH

SEQ ID NO: 48224 - protein, 10 aa, Artificial Sequence
  Description of Artificial Sequence: Synthetic epitope
SSMEQLSQHE

SEQ ID NO: 48225 - protein, 10 aa, Artificial Sequence
  Description of Artificial Sequence: Synthetic epitope
SSMETSIEPK

SEQ ID NO: 48226 - protein, 10 aa, Artificial Sequence
  Description of Artificial Sequence: Synthetic epitope
SSMEVFNANI

SEQ ID NO: 48227 - protein, 10 aa, Artificial Sequence
  Description of Artificial Sequence: Synthetic epitope
SSMGKEELRH

SEQ ID NO: 48228 - protein, 10 aa, Artificial Sequence
  Description of Artificial Sequence: Synthetic epitope
SSMHNKSATY

SEQ ID NO: 48229 - protein, 10 aa, Artificial Sequence
  Description of Artificial Sequence: Synthetic epitope
SSMPGLQTIN

SEQ ID NO: 48230 - protein, 10 aa, Artificial Sequence
  Description of Artificial Sequence: Synthetic epitope
SSMQQILPIV

SEQ ID NO: 48231 - protein, 10 aa, Artificial Sequence
  Description of Artificial Sequence: Synthetic epitope
SSMRELVGSG

SEQ ID NO: 48232 - protein, 10 aa, Artificial Sequence
  Description of Artificial Sequence: Synthetic epitope
SSMSAGANSN

SEQ ID NO: 48233 - protein, 10 aa, Artificial Sequence
  Description of Artificial Sequence: Synthetic epitope
SSMSFVSKPE

SEQ ID NO: 48234 - protein, 10 aa, Artificial Sequence
  Description of Artificial Sequence: Synthetic epitope
SSMSNSFPVE

SEQ ID NO: 48235 - protein, 10 aa, Artificial Sequence
  Description of Artificial Sequence: Synthetic epitope
SSMSPELSMN

SEQ ID NO: 48236 - protein, 10 aa, Artificial Sequence
  Description of Artificial Sequence: Synthetic epitope
SSMSQLLQSM

SEQ ID NO: 48237 - protein, 10 aa, Artificial Sequence
  Description of Artificial Sequence: Synthetic epitope
SSMSVEAETT

SEQ ID NO: 48238 - protein, 10 aa, Artificial Sequence
  Description of Artificial Sequence: Synthetic epitope
SSMSVSELKA

SEQ ID NO: 48239 - protein, 10 aa, Artificial Sequence
  Description of Artificial Sequence: Synthetic epitope
SSMVENEVIK

SEQ ID NO: 48240 - protein, 10 aa, Artificial Sequence
  Description of Artificial Sequence: Synthetic epitope
SSMVSKEVNS

SEQ ID NO: 48241 - protein, 10 aa, Artificial Sequence
  Description of Artificial Sequence: Synthetic epitope
SSMVTTPTSS

SEQ ID NO: 48242 - protein, 10 aa, Artificial Sequence
  Description of Artificial Sequence: Synthetic epitope
SSNASKGREA

SEQ ID NO: 48243 - protein, 10 aa, Artificial Sequence
  Description of Artificial Sequence: Synthetic epitope
SSNDAAQVGK

SEQ ID NO: 48244 - protein, 10 aa, Artificial Sequence
  Description of Artificial Sequence: Synthetic epitope
SSNDIPIAKI

SEQ ID NO: 48245 - protein, 10 aa, Artificial Sequence
  Description of Artificial Sequence: Synthetic epitope
SSNDSGNKVG

SEQ ID NO: 48246 - protein, 10 aa, Artificial Sequence
  Description of Artificial Sequence: Synthetic epitope
SSNEEVMFLT

SEQ ID NO: 48247 - protein, 10 aa, Artificial Sequence
  Description of Artificial Sequence: Synthetic epitope
SSNEHAAPAA

SEQ ID NO: 48248 - protein, 10 aa, Artificial Sequence
  Description of Artificial Sequence: Synthetic epitope
SSNEKAVMSL

SEQ ID NO: 48249 - protein, 10 aa, Artificial Sequence
  Description of Artificial Sequence: Synthetic epitope
SSNEYLYERF

SEQ ID NO: 48250 - protein, 10 aa, Artificial Sequence
  Description of Artificial Sequence: Synthetic epitope
SSNFHINVEE

SEQ ID NO: 48251 - protein, 10 aa, Artificial Sequence
  Description of Artificial Sequence: Synthetic epitope
SSNFNSALVA

SEQ ID NO: 48252 - protein, 10 aa, Artificial Sequence
  Description of Artificial Sequence: Synthetic epitope
SSNGKNVRIL

SEQ ID NO: 48253 - protein, 10 aa, Artificial Sequence
  Description of Artificial Sequence: Synthetic epitope
SSNIAAPVEQ

SEQ ID NO: 48254 - protein, 10 aa, Artificial Sequence
  Description of Artificial Sequence: Synthetic epitope
SSNIEKSVKD

SEQ ID NO: 48255 - protein, 10 aa, Artificial Sequence
  Description of Artificial Sequence: Synthetic epitope
SSNIIMDTST

SEQ ID NO: 48256 - protein, 10 aa, Artificial Sequence
  Description of Artificial Sequence: Synthetic epitope
SSNKDHQGRA

SEQ ID NO: 48257 - protein, 10 aa, Artificial Sequence
  Description of Artificial Sequence: Synthetic epitope
SSNKDMFADR

SEQ ID NO: 48258 - protein, 10 aa, Artificial Sequence
  Description of Artificial Sequence: Synthetic epitope
SSNKKNSPTS

SEQ ID NO: 48259 - protein, 10 aa, Artificial Sequence
  Description of Artificial Sequence: Synthetic epitope
SSNKSGETNP

SEQ ID NO: 48260 - protein, 10 aa, Artificial Sequence
  Description of Artificial Sequence: Synthetic epitope
SSNKVGKLSE

SEQ ID NO: 48261 - protein, 10 aa, Artificial Sequence
  Description of Artificial Sequence: Synthetic epitope
SSNKVKSGDD

SEQ ID NO: 48262 - protein, 10 aa, Artificial Sequence
  Description of Artificial Sequence: Synthetic epitope
SSNLKIDALS

SEQ ID NO: 48263 - protein, 10 aa, Artificial Sequence
  Description of Artificial Sequence: Synthetic epitope
SSNLKKTLSQ

SEQ ID NO: 48264 - protein, 10 aa, Artificial Sequence
  Description of Artificial Sequence: Synthetic epitope
SSNLLSTQDA

SEQ ID NO: 48265 - protein, 10 aa, Artificial Sequence
  Description of Artificial Sequence: Synthetic epitope
SSNPAASAGL

SEQ ID NO: 48266 - protein, 10 aa, Artificial Sequence
  Description of Artificial Sequence: Synthetic epitope
SSNPSKSQGR

SEQ ID NO: 48267 - protein, 10 aa, Artificial Sequence
  Description of Artificial Sequence: Synthetic epitope
SSNQQGDADI

SEQ ID NO: 48268 - protein, 10 aa, Artificial Sequence
  Description of Artificial Sequence: Synthetic epitope
SSNSDLVLQT

SEQ ID NO: 48269 - protein, 10 aa, Artificial Sequence
  Description of Artificial Sequence: Synthetic epitope
SSNSEKNSLP

SEQ ID NO: 48270 - protein, 10 aa, Artificial Sequence
  Description of Artificial Sequence: Synthetic epitope
SSNSKKASIL

SEQ ID NO: 48271 - protein, 10 aa, Artificial Sequence
  Description of Artificial Sequence: Synthetic epitope
SSNSQDEVRE

SEQ ID NO: 48272 - protein, 10 aa, Artificial Sequence
  Description of Artificial Sequence: Synthetic epitope
SSNSSGDALV

SEQ ID NO: 48273 - protein, 10 aa, Artificial Sequence
  Description of Artificial Sequence: Synthetic epitope
SSNSSKLPPV

SEQ ID NO: 48274 - protein, 10 aa, Artificial Sequence
  Description of Artificial Sequence: Synthetic epitope
SSNSSNERED

SEQ ID NO: 48275 - protein, 10 aa, Artificial Sequence
  Description of Artificial Sequence: Synthetic epitope
SSNSTSQAGD

SEQ ID NO: 48276 - protein, 10 aa, Artificial Sequence
  Description of Artificial Sequence: Synthetic epitope
SSNSTSRVFT

SEQ ID NO: 48277 - protein, 10 aa, Artificial Sequence
  Description of Artificial Sequence: Synthetic epitope
SSNSVAYKNF

SEQ ID NO: 48278 - protein, 10 aa, Artificial Sequence
  Description of Artificial Sequence: Synthetic epitope
SSNTAEIQSR

SEQ ID NO: 48279 - protein, 10 aa, Artificial Sequence
  Description of Artificial Sequence: Synthetic epitope
SSNTKAVTTF

SEQ ID NO: 48280 - protein, 10 aa, Artificial Sequence
  Description of Artificial Sequence: Synthetic epitope
SSNTRQIEIN

SEQ ID NO: 48281 - protein, 10 aa, Artificial Sequence
  Description of Artificial Sequence: Synthetic epitope
SSNVGAYMQP

SEQ ID NO: 48282 - protein, 10 aa, Artificial Sequence
  Description of Artificial Sequence: Synthetic epitope
SSNVSVLQQF

SEQ ID NO: 48283 - protein, 10 aa, Artificial Sequence
  Description of Artificial Sequence: Synthetic epitope
SSNVTSTSGH

SEQ ID NO: 48284 - protein, 10 aa, Artificial Sequence
  Description of Artificial Sequence: Synthetic epitope
SSPAKERLED

SEQ ID NO: 48285 - protein, 10 aa, Artificial Sequence
  Description of Artificial Sequence: Synthetic epitope
SSPALSSVPE

SEQ ID NO: 48286 - protein, 10 aa, Artificial Sequence
  Description of Artificial Sequence: Synthetic epitope
SSPALTAGAS

SEQ ID NO: 48287 - protein, 10 aa, Artificial Sequence
  Description of Artificial Sequence: Synthetic epitope
SSPASDSGMA

SEQ ID NO: 48288 - protein, 10 aa, Artificial Sequence
  Description of Artificial Sequence: Synthetic epitope
SSPAVSRSKT

SEQ ID NO: 48289 - protein, 10 aa, Artificial Sequence
  Description of Artificial Sequence: Synthetic epitope
SSPEATETSQ

SEQ ID NO: 48290 - protein, 10 aa, Artificial Sequence
  Description of Artificial Sequence: Synthetic epitope
SSPEKILVNK

SEQ ID NO: 48291 - protein, 10 aa, Artificial Sequence
  Description of Artificial Sequence: Synthetic epitope
SSPEMDISAD

SEQ ID NO: 48292 - protein, 10 aa, Artificial Sequence
  Description of Artificial Sequence: Synthetic epitope
SSPERNRKRS

SEQ ID NO: 48293 - protein, 10 aa, Artificial Sequence
  Description of Artificial Sequence: Synthetic epitope
SSPETRSRTP

SEQ ID NO: 48294 - protein, 10 aa, Artificial Sequence
  Description of Artificial Sequence: Synthetic epitope
SSPEVLEVSS

SEQ ID NO: 48295 - protein, 10 aa, Artificial Sequence
  Description of Artificial Sequence: Synthetic epitope
SSPGRSHSKD

SEQ ID NO: 48296 - protein, 10 aa, Artificial Sequence
  Description of Artificial Sequence: Synthetic epitope
SSPLLKVLDE

SEQ ID NO: 48297 - protein, 10 aa, Artificial Sequence
  Description of Artificial Sequence: Synthetic epitope
SSPLMSSAVQ

SEQ ID NO: 48298 - protein, 10 aa, Artificial Sequence
  Description of Artificial Sequence: Synthetic epitope
SSPQKSKLME

SEQ ID NO: 48299 - protein, 10 aa, Artificial Sequence
  Description of Artificial Sequence: Synthetic epitope
SSPQLQVKSS

SEQ ID NO: 48300 - protein, 10 aa, Artificial Sequence
  Description of Artificial Sequence: Synthetic epitope
SSPQSSAGGK

SEQ ID NO: 48301 - protein, 10 aa, Artificial Sequence
  Description of Artificial Sequence: Synthetic epitope
SSPQTQSRLQ

SEQ ID NO: 48302 - protein, 10 aa, Artificial Sequence
  Description of Artificial Sequence: Synthetic epitope
SSPRKAIHSD

SEQ ID NO: 48303 - protein, 10 aa, Artificial Sequence
  Description of Artificial Sequence: Synthetic epitope
SSPRSINKKA

SEQ ID NO: 48304 - protein, 10 aa, Artificial Sequence
  Description of Artificial Sequence: Synthetic epitope
SSPSEASTTD

SEQ ID NO: 48305 - protein, 10 aa, Artificial Sequence
  Description of Artificial Sequence: Synthetic epitope
SSPSKKQSKE

SEQ ID NO: 48306 - protein, 10 aa, Artificial Sequence
  Description of Artificial Sequence: Synthetic epitope
SSPSKVSNKF

SEQ ID NO: 48307 - protein, 10 aa, Artificial Sequence
  Description of Artificial Sequence: Synthetic epitope
SSPSNSLETQ

SEQ ID NO: 48308 - protein, 10 aa, Artificial Sequence
  Description of Artificial Sequence: Synthetic epitope
SSPSRMNSEG

SEQ ID NO: 48309 - protein, 10 aa, Artificial Sequence
  Description of Artificial Sequence: Synthetic epitope
SSPTAQPAEV

SEQ ID NO: 48310 - protein, 10 aa, Artificial Sequence
  Description of Artificial Sequence: Synthetic epitope
SSPTQSEIST

SEQ ID NO: 48311 - protein, 10 aa, Artificial Sequence
  Description of Artificial Sequence: Synthetic epitope
SSPTQYGLTK

SEQ ID NO: 48312 - protein, 10 aa, Artificial Sequence
  Description of Artificial Sequence: Synthetic epitope
SSPTTLEGTT

SEQ ID NO: 48313 - protein, 10 aa, Artificial Sequence
  Description of Artificial Sequence: Synthetic epitope
SSPVAQMLAA

SEQ ID NO: 48314 - protein, 10 aa, Artificial Sequence
  Description of Artificial Sequence: Synthetic epitope
SSPVATATTP

SEQ ID NO: 48315 - protein, 10 aa, Artificial Sequence
  Description of Artificial Sequence: Synthetic epitope
SSPVDEYTSS

SEQ ID NO: 48316 - protein, 10 aa, Artificial Sequence
  Description of Artificial Sequence: Synthetic epitope
SSPVEKEVVE

SEQ ID NO: 48317 - protein, 10 aa, Artificial Sequence
  Description of Artificial Sequence: Synthetic epitope
SSPVMLAFKS

SEQ ID NO: 48318 - protein, 10 aa, Artificial Sequence
  Description of Artificial Sequence: Synthetic epitope
SSPVSMTASA

SEQ ID NO: 48319 - protein, 10 aa, Artificial Sequence
  Description of Artificial Sequence: Synthetic epitope
SSQADTSKSK

SEQ ID NO: 48320 - protein, 10 aa, Artificial Sequence
  Description of Artificial Sequence: Synthetic epitope
SSQAFIGEEV

SEQ ID NO: 48321 - protein, 10 aa, Artificial Sequence
  Description of Artificial Sequence: Synthetic epitope
SSQAFLQSQK

SEQ ID NO: 48322 - protein, 10 aa, Artificial Sequence
  Description of Artificial Sequence: Synthetic epitope
SSQAISQQHL

SEQ ID NO: 48323 - protein, 10 aa, Artificial Sequence
  Description of Artificial Sequence: Synthetic epitope
SSQALAELST

SEQ ID NO: 48324 - protein, 10 aa, Artificial Sequence
  Description of Artificial Sequence: Synthetic epitope
SSQASSLNVE

SEQ ID NO: 48325 - protein, 10 aa, Artificial Sequence
  Description of Artificial Sequence: Synthetic epitope
SSQATTSKGV

SEQ ID NO: 48326 - protein, 10 aa, Artificial Sequence
  Description of Artificial Sequence: Synthetic epitope
SSQAVLASSA

SEQ ID NO: 48327 - protein, 10 aa, Artificial Sequence
  Description of Artificial Sequence: Synthetic epitope
SSQDAISIAS

SEQ ID NO: 48328 - protein, 10 aa, Artificial Sequence
  Description of Artificial Sequence: Synthetic epitope
SSQDALGLSK

SEQ ID NO: 48329 - protein, 10 aa, Artificial Sequence
  Description of Artificial Sequence: Synthetic epitope
SSQDVSLDSN

SEQ ID NO: 48330 - protein, 10 aa, Artificial Sequence
  Description of Artificial Sequence: Synthetic epitope
SSQEAVSALD

SEQ ID NO: 48331 - protein, 10 aa, Artificial Sequence
  Description of Artificial Sequence: Synthetic epitope
SSQEERIERE

SEQ ID NO: 48332 - protein, 10 aa, Artificial Sequence
  Description of Artificial Sequence: Synthetic epitope
SSQEESIGTL

SEQ ID NO: 48333 - protein, 10 aa, Artificial Sequence
  Description of Artificial Sequence: Synthetic epitope
SSQEESQRKP

SEQ ID NO: 48334 - protein, 10 aa, Artificial Sequence
  Description of Artificial Sequence: Synthetic epitope
SSQEIDKPFE

SEQ ID NO: 48335 - protein, 10 aa, Artificial Sequence
  Description of Artificial Sequence: Synthetic epitope
SSQEMQVENE

SEQ ID NO: 48336 - protein, 10 aa, Artificial Sequence
  Description of Artificial Sequence: Synthetic epitope
SSQEQQSFSD

SEQ ID NO: 48337 - protein, 10 aa, Artificial Sequence
  Description of Artificial Sequence: Synthetic epitope
SSQEVDLVDQ

SEQ ID NO: 48338 - protein, 10 aa, Artificial Sequence
  Description of Artificial Sequence: Synthetic epitope
SSQFSSDQEI

SEQ ID NO: 48339 - protein, 10 aa, Artificial Sequence
  Description of Artificial Sequence: Synthetic epitope
SSQGIIRNKT

SEQ ID NO: 48340 - protein, 10 aa, Artificial Sequence
  Description of Artificial Sequence: Synthetic epitope
SSQGQSNTDK

SEQ ID NO: 48341 - protein, 10 aa, Artificial Sequence
  Description of Artificial Sequence: Synthetic epitope
SSQGVEQVVL

SEQ ID NO: 48342 - protein, 10 aa, Artificial Sequence
  Description of Artificial Sequence: Synthetic epitope
SSQHSDKSEE

SEQ ID NO: 48343 - protein, 10 aa, Artificial Sequence
  Description of Artificial Sequence: Synthetic epitope
SSQIITSVVS

SEQ ID NO: 48344 - protein, 10 aa, Artificial Sequence
  Description of Artificial Sequence: Synthetic epitope
SSQISAGEEK

SEQ ID NO: 48345 - protein, 10 aa, Artificial Sequence
  Description of Artificial Sequence: Synthetic epitope
SSQISTDTVS

SEQ ID NO: 48346 - protein, 10 aa, Artificial Sequence
  Description of Artificial Sequence: Synthetic epitope
SSQKEVAATE

SEQ ID NO: 48347 - protein, 10 aa, Artificial Sequence
  Description of Artificial Sequence: Synthetic epitope
SSQKEVSHES

SEQ ID NO: 48348 - protein, 10 aa, Artificial Sequence
  Description of Artificial Sequence: Synthetic epitope
SSQKLTSQKE

SEQ ID NO: 48349 - protein, 10 aa, Artificial Sequence
  Description of Artificial Sequence: Synthetic epitope
SSQKPDSAAS

SEQ ID NO: 48350 - protein, 10 aa, Artificial Sequence
  Description of Artificial Sequence: Synthetic epitope
SSQKQNNKTE

SEQ ID NO: 48351 - protein, 10 aa, Artificial Sequence
  Description of Artificial Sequence: Synthetic epitope
SSQKRGPARH

SEQ ID NO: 48352 - protein, 10 aa, Artificial Sequence
  Description of Artificial Sequence: Synthetic epitope
SSQLALAKMV

SEQ ID NO: 48353 - protein, 10 aa, Artificial Sequence
  Description of Artificial Sequence: Synthetic epitope
SSQLDSTSVD

SEQ ID NO: 48354 - protein, 10 aa, Artificial Sequence
  Description of Artificial Sequence: Synthetic epitope
SSQLKESHSP

SEQ ID NO: 48355 - protein, 10 aa, Artificial Sequence
  Description of Artificial Sequence: Synthetic epitope
SSQLQSWTVQ

SEQ ID NO: 48356 - protein, 10 aa, Artificial Sequence
  Description of Artificial Sequence: Synthetic epitope
SSQLYRESAT

SEQ ID NO: 48357 - protein, 10 aa, Artificial Sequence
  Description of Artificial Sequence: Synthetic epitope
SSQMIFSTLR

SEQ ID NO: 48358 - protein, 10 aa, Artificial Sequence
  Description of Artificial Sequence: Synthetic epitope
SSQMIFSTLR

SEQ ID NO: 48359 - protein, 10 aa, Artificial Sequence
  Description of Artificial Sequence: Synthetic epitope
SSQMSMKTRR

SEQ ID NO: 48360 - protein, 10 aa, Artificial Sequence
  Description of Artificial Sequence: Synthetic epitope
SSQNRIRDSE

SEQ ID NO: 48361 - protein, 10 aa, Artificial Sequence
  Description of Artificial Sequence: Synthetic epitope
SSQNTDLDEL

SEQ ID NO: 48362 - protein, 10 aa, Artificial Sequence
  Description of Artificial Sequence: Synthetic epitope
SSQNTIINES

SEQ ID NO: 48363 - protein, 10 aa, Artificial Sequence
  Description of Artificial Sequence: Synthetic epitope
SSQNTNVLNS

SEQ ID NO: 48364 - protein, 10 aa, Artificial Sequence
  Description of Artificial Sequence: Synthetic epitope
SSQNTTQFTF

SEQ ID NO: 48365 - protein, 10 aa, Artificial Sequence
  Description of Artificial Sequence: Synthetic epitope
SSQPALASKS

SEQ ID NO: 48366 - protein, 10 aa, Artificial Sequence
  Description of Artificial Sequence: Synthetic epitope
SSQPIKESNS

SEQ ID NO: 48367 - protein, 10 aa, Artificial Sequence
  Description of Artificial Sequence: Synthetic epitope
SSQPKFERDL

SEQ ID NO: 48368 - protein, 10 aa, Artificial Sequence
  Description of Artificial Sequence: Synthetic epitope
SSQPNATLYK

SEQ ID NO: 48369 - protein, 10 aa, Artificial Sequence
  Description of Artificial Sequence: Synthetic epitope
SSQPSQHRII

SEQ ID NO: 48370 - protein, 10 aa, Artificial Sequence
  Description of Artificial Sequence: Synthetic epitope
SSQPVISAQE

SEQ ID NO: 48371 - protein, 10 aa, Artificial Sequence
  Description of Artificial Sequence: Synthetic epitope
SSQQAATKQS

SEQ ID NO: 48372 - protein, 10 aa, Artificial Sequence
  Description of Artificial Sequence: Synthetic epitope
SSQQLLSSTP

SEQ ID NO: 48373 - protein, 10 aa, Artificial Sequence
  Description of Artificial Sequence: Synthetic epitope
SSQQSKYSHT

SEQ ID NO: 48374 - protein, 10 aa, Artificial Sequence
  Description of Artificial Sequence: Synthetic epitope
SSQRADSHKG

SEQ ID NO: 48375 - protein, 10 aa, Artificial Sequence
  Description of Artificial Sequence: Synthetic epitope
SSQRQAGLTY

SEQ ID NO: 48376 - protein, 10 aa, Artificial Sequence
  Description of Artificial Sequence: Synthetic epitope
SSQRTETTSR

SEQ ID NO: 48377 - protein, 10 aa, Artificial Sequence
  Description of Artificial Sequence: Synthetic epitope
SSQRTLSVQE

SEQ ID NO: 48378 - protein, 10 aa, Artificial Sequence
  Description of Artificial Sequence: Synthetic epitope
SSQRVLPSKQ

SEQ ID NO: 48379 - protein, 10 aa, Artificial Sequence
  Description of Artificial Sequence: Synthetic epitope
SSQSDDIEQE

SEQ ID NO: 48380 - protein, 10 aa, Artificial Sequence
  Description of Artificial Sequence: Synthetic epitope
SSQSEQDTSE

SEQ ID NO: 48381 - protein, 10 aa, Artificial Sequence
  Description of Artificial Sequence: Synthetic epitope
SSQSIRVATV

SEQ ID NO: 48382 - protein, 10 aa, Artificial Sequence
  Description of Artificial Sequence: Synthetic epitope
SSQSIRVATV

SEQ ID NO: 48383 - protein, 10 aa, Artificial Sequence
  Description of Artificial Sequence: Synthetic epitope
SSQSLASLAT

SEQ ID NO: 48384 - protein, 10 aa, Artificial Sequence
  Description of Artificial Sequence: Synthetic epitope
SSQSNFSQGA

SEQ ID NO: 48385 - protein, 10 aa, Artificial Sequence
  Description of Artificial Sequence: Synthetic epitope
SSQSPEAIKQ

SEQ ID NO: 48386 - protein, 10 aa, Artificial Sequence
  Description of Artificial Sequence: Synthetic epitope
SSQSQALQNS

SEQ ID NO: 48387 - protein, 10 aa, Artificial Sequence
  Description of Artificial Sequence: Synthetic epitope
SSQSSQVPEK

SEQ ID NO: 48388 - protein, 10 aa, Artificial Sequence
  Description of Artificial Sequence: Synthetic epitope
SSQSTGSQQI

SEQ ID NO: 48389 - protein, 10 aa, Artificial Sequence
  Description of Artificial Sequence: Synthetic epitope
SSQTAAQVTK

SEQ ID NO: 48390 - protein, 10 aa, Artificial Sequence
  Description of Artificial Sequence: Synthetic epitope
SSQTANKPSR

SEQ ID NO: 48391 - protein, 10 aa, Artificial Sequence
  Description of Artificial Sequence: Synthetic epitope
SSQTLTQFDS

SEQ ID NO: 48392 - protein, 10 aa, Artificial Sequence
  Description of Artificial Sequence: Synthetic epitope
SSQTNSLKDL

SEQ ID NO: 48393 - protein, 10 aa, Artificial Sequence
  Description of Artificial Sequence: Synthetic epitope
SSQTPSLNRD

SEQ ID NO: 48394 - protein, 10 aa, Artificial Sequence
  Description of Artificial Sequence: Synthetic epitope
SSQVATMQME

SEQ ID NO: 48395 - protein, 10 aa, Artificial Sequence
  Description of Artificial Sequence: Synthetic epitope
SSQVKSKLQI

SEQ ID NO: 48396 - protein, 10 aa, Artificial Sequence
  Description of Artificial Sequence: Synthetic epitope
SSQVRTSDAY

SEQ ID NO: 48397 - protein, 10 aa, Artificial Sequence
  Description of Artificial Sequence: Synthetic epitope
SSQVTFTSAI

SEQ ID NO: 48398 - protein, 10 aa, Artificial Sequence
  Description of Artificial Sequence: Synthetic epitope
SSQVVPQGIS

SEQ ID NO: 48399 - protein, 10 aa, Artificial Sequence
  Description of Artificial Sequence: Synthetic epitope
SSQYFVEQEK

SEQ ID NO: 48400 - protein, 10 aa, Artificial Sequence
  Description of Artificial Sequence: Synthetic epitope
SSQYISTASY

SEQ ID NO: 48401 - protein, 10 aa, Artificial Sequence
  Description of Artificial Sequence: Synthetic epitope
SSRAASEISE

SEQ ID NO: 48402 - protein, 10 aa, Artificial Sequence
  Description of Artificial Sequence: Synthetic epitope
SSRALSLQLG

SEQ ID NO: 48403 - protein, 10 aa, Artificial Sequence
  Description of Artificial Sequence: Synthetic epitope
SSRANRIRSN

SEQ ID NO: 48404 - protein, 10 aa, Artificial Sequence
  Description of Artificial Sequence: Synthetic epitope
SSRARKRAAK

SEQ ID NO: 48405 - protein, 10 aa, Artificial Sequence
  Description of Artificial Sequence: Synthetic epitope
SSRDAQIKFL

SEQ ID NO: 48406 - protein, 10 aa, Artificial Sequence
  Description of Artificial Sequence: Synthetic epitope
SSRDEAPIIS

SEQ ID NO: 48407 - protein, 10 aa, Artificial Sequence
  Description of Artificial Sequence: Synthetic epitope
SSRDPDNIAA

SEQ ID NO: 48408 - protein, 10 aa, Artificial Sequence
  Description of Artificial Sequence: Synthetic epitope
SSRDSESWDH

SEQ ID NO: 48409 - protein, 10 aa, Artificial Sequence
  Description of Artificial Sequence: Synthetic epitope
SSREKEAKRN

SEQ ID NO: 48410 - protein, 10 aa, Artificial Sequence
  Description of Artificial Sequence: Synthetic epitope
SSRERAALSL

SEQ ID NO: 48411 - protein, 10 aa, Artificial Sequence
  Description of Artificial Sequence: Synthetic epitope
SSRESVSKAG

SEQ ID NO: 48412 - protein, 10 aa, Artificial Sequence
  Description of Artificial Sequence: Synthetic epitope
SSRETSRRQE

SEQ ID NO: 48413 - protein, 10 aa, Artificial Sequence
  Description of Artificial Sequence: Synthetic epitope
SSREVTSSVL

SEQ ID NO: 48414 - protein, 10 aa, Artificial Sequence
  Description of Artificial Sequence: Synthetic epitope
SSRFIHQQPQ

SEQ ID NO: 48415 - protein, 10 aa, Artificial Sequence
  Description of Artificial Sequence: Synthetic epitope
SSRFKVTVSV

SEQ ID NO: 48416 - protein, 10 aa, Artificial Sequence
  Description of Artificial Sequence: Synthetic epitope
SSRFSKSQLD

SEQ ID NO: 48417 - protein, 10 aa, Artificial Sequence
  Description of Artificial Sequence: Synthetic epitope
SSRGQKNLKS

SEQ ID NO: 48418 - protein, 10 aa, Artificial Sequence
  Description of Artificial Sequence: Synthetic epitope
SSRHLMKNNP

SEQ ID NO: 48419 - protein, 10 aa, Artificial Sequence
  Description of Artificial Sequence: Synthetic epitope
SSRIVREMDK

SEQ ID NO: 48420 - protein, 10 aa, Artificial Sequence
  Description of Artificial Sequence: Synthetic epitope
SSRKADEITK

SEQ ID NO: 48421 - protein, 10 aa, Artificial Sequence
  Description of Artificial Sequence: Synthetic epitope
SSRKEAESSP

SEQ ID NO: 48422 - protein, 10 aa, Artificial Sequence
  Description of Artificial Sequence: Synthetic epitope
SSRKGLTLDA

SEQ ID NO: 48423 - protein, 10 aa, Artificial Sequence
  Description of Artificial Sequence: Synthetic epitope
SSRKMKTKSD

SEQ ID NO: 48424 - protein, 10 aa, Artificial Sequence
  Description of Artificial Sequence: Synthetic epitope
SSRKYDKQMA

SEQ ID NO: 48425 - protein, 10 aa, Artificial Sequence
  Description of Artificial Sequence: Synthetic epitope
SSRLFSEIQT

SEQ ID NO: 48426 - protein, 10 aa, Artificial Sequence
  Description of Artificial Sequence: Synthetic epitope
SSRLQAIKLQ

SEQ ID NO: 48427 - protein, 10 aa, Artificial Sequence
  Description of Artificial Sequence: Synthetic epitope
SSRLRSAVSR

SEQ ID NO: 48428 - protein, 10 aa, Artificial Sequence
  Description of Artificial Sequence: Synthetic epitope
SSRLSDASAR

SEQ ID NO: 48429 - protein, 10 aa, Artificial Sequence
  Description of Artificial Sequence: Synthetic epitope
SSRLSQVPMS

SEQ ID NO: 48430 - protein, 10 aa, Artificial Sequence
  Description of Artificial Sequence: Synthetic epitope
SSRLSSQHRQ

SEQ ID NO: 48431 - protein, 10 aa, Artificial Sequence
  Description of Artificial Sequence: Synthetic epitope
SSRLTKLTRR

SEQ ID NO: 48432 - protein, 10 aa, Artificial Sequence
  Description of Artificial Sequence: Synthetic epitope
SSRMITSVSP

SEQ ID NO: 48433 - protein, 10 aa, Artificial Sequence
  Description of Artificial Sequence: Synthetic epitope
SSRMVKKMKK

SEQ ID NO: 48434 - protein, 10 aa, Artificial Sequence
  Description of Artificial Sequence: Synthetic epitope
SSRMVVHESE

SEQ ID NO: 48435 - protein, 10 aa, Artificial Sequence
  Description of Artificial Sequence: Synthetic epitope
SSRNMSSRKK

SEQ ID NO: 48436 - protein, 10 aa, Artificial Sequence
  Description of Artificial Sequence: Synthetic epitope
SSRNRTQLKV

SEQ ID NO: 48437 - protein, 10 aa, Artificial Sequence
  Description of Artificial Sequence: Synthetic epitope
SSRNYSVASG

SEQ ID NO: 48438 - protein, 10 aa, Artificial Sequence
  Description of Artificial Sequence: Synthetic epitope
SSRPDRETRA

SEQ ID NO: 48439 - protein, 10 aa, Artificial Sequence
  Description of Artificial Sequence: Synthetic epitope
SSRPQSRSVM

SEQ ID NO: 48440 - protein, 10 aa, Artificial Sequence
  Description of Artificial Sequence: Synthetic epitope
SSRQEETKKD

SEQ ID NO: 48441 - protein, 10 aa, Artificial Sequence
  Description of Artificial Sequence: Synthetic epitope
SSRRGSVVSM

SEQ ID NO: 48442 - protein, 10 aa, Artificial Sequence
  Description of Artificial Sequence: Synthetic epitope
SSRRIISESQ

SEQ ID NO: 48443 - protein, 10 aa, Artificial Sequence
  Description of Artificial Sequence: Synthetic epitope
SSRRKSRKLA

SEQ ID NO: 48444 - protein, 10 aa, Artificial Sequence
  Description of Artificial Sequence: Synthetic epitope
SSRRQRARNM

SEQ ID NO: 48445 - protein, 10 aa, Artificial Sequence
  Description of Artificial Sequence: Synthetic epitope
SSRRVFNPAQ

SEQ ID NO: 48446 - protein, 10 aa, Artificial Sequence
  Description of Artificial Sequence: Synthetic epitope
SSRSAEKRSA

SEQ ID NO: 48447 - protein, 10 aa, Artificial Sequence
  Description of Artificial Sequence: Synthetic epitope
SSRSDQSQKN

SEQ ID NO: 48448 - protein, 10 aa, Artificial Sequence
  Description of Artificial Sequence: Synthetic epitope
SSRSHSRVRA

SEQ ID NO: 48449 - protein, 10 aa, Artificial Sequence
  Description of Artificial Sequence: Synthetic epitope
SSRSLITPQV

SEQ ID NO: 48450 - protein, 10 aa, Artificial Sequence
  Description of Artificial Sequence: Synthetic epitope
SSRSSVTGAE

SEQ ID NO: 48451 - protein, 10 aa, Artificial Sequence
  Description of Artificial Sequence: Synthetic epitope
SSRSVIVDTK

SEQ ID NO: 48452 - protein, 10 aa, Artificial Sequence
  Description of Artificial Sequence: Synthetic epitope
SSRSVRTTRG

SEQ ID NO: 48453 - protein, 10 aa, Artificial Sequence
  Description of Artificial Sequence: Synthetic epitope
SSRSYTSHTN

SEQ ID NO: 48454 - protein, 10 aa, Artificial Sequence
  Description of Artificial Sequence: Synthetic epitope
SSRTATVHLQ

SEQ ID NO: 48455 - protein, 10 aa, Artificial Sequence
  Description of Artificial Sequence: Synthetic epitope
SSRTHTSSRI

SEQ ID NO: 48456 - protein, 10 aa, Artificial Sequence
  Description of Artificial Sequence: Synthetic epitope
SSRTQTEWMT

SEQ ID NO: 48457 - protein, 10 aa, Artificial Sequence
  Description of Artificial Sequence: Synthetic epitope
SSRTSVSQIP

SEQ ID NO: 48458 - protein, 10 aa, Artificial Sequence
  Description of Artificial Sequence: Synthetic epitope
SSRVDEYPQS

SEQ ID NO: 48459 - protein, 10 aa, Artificial Sequence
  Description of Artificial Sequence: Synthetic epitope
SSRVKSYNQA

SEQ ID NO: 48460 - protein, 10 aa, Artificial Sequence
  Description of Artificial Sequence: Synthetic epitope
SSRVTVDRST

SEQ ID NO: 48461 - protein, 10 aa, Artificial Sequence
  Description of Artificial Sequence: Synthetic epitope
SSRYKLYEAE

SEQ ID NO: 48462 - protein, 10 aa, Artificial Sequence
  Description of Artificial Sequence: Synthetic epitope
SSTAAQDAQG

SEQ ID NO: 48463 - protein, 10 aa, Artificial Sequence
  Description of Artificial Sequence: Synthetic epitope
SSTAEINETT

SEQ ID NO: 48464 - protein, 10 aa, Artificial Sequence
  Description of Artificial Sequence: Synthetic epitope
SSTAKNLMQF

SEQ ID NO: 48465 - protein, 10 aa, Artificial Sequence
  Description of Artificial Sequence: Synthetic epitope
SSTAMNGNLA

SEQ ID NO: 48466 - protein, 10 aa, Artificial Sequence
  Description of Artificial Sequence: Synthetic epitope
SSTANGKIES

SEQ ID NO: 48467 - protein, 10 aa, Artificial Sequence
  Description of Artificial Sequence: Synthetic epitope
SSTANIDDLK

SEQ ID NO: 48468 - protein, 10 aa, Artificial Sequence
  Description of Artificial Sequence: Synthetic epitope
SSTARRILQS

SEQ ID NO: 48469 - protein, 10 aa, Artificial Sequence
  Description of Artificial Sequence: Synthetic epitope
SSTARSASPL

SEQ ID NO: 48470 - protein, 10 aa, Artificial Sequence
  Description of Artificial Sequence: Synthetic epitope
SSTASLALEK

SEQ ID NO: 48471 - protein, 10 aa, Artificial Sequence
  Description of Artificial Sequence: Synthetic epitope
SSTASLSTQH

SEQ ID NO: 48472 - protein, 10 aa, Artificial Sequence
  Description of Artificial Sequence: Synthetic epitope
SSTATLTANF

SEQ ID NO: 48473 - protein, 10 aa, Artificial Sequence
  Description of Artificial Sequence: Synthetic epitope
SSTATSVTAS

SEQ ID NO: 48474 - protein, 10 aa, Artificial Sequence
  Description of Artificial Sequence: Synthetic epitope
SSTDAEQLKI

SEQ ID NO: 48475 - protein, 10 aa, Artificial Sequence
  Description of Artificial Sequence: Synthetic epitope
SSTDESARRS

SEQ ID NO: 48476 - protein, 10 aa, Artificial Sequence
  Description of Artificial Sequence: Synthetic epitope
SSTDNLKHST

SEQ ID NO: 48477 - protein, 10 aa, Artificial Sequence
  Description of Artificial Sequence: Synthetic epitope
SSTDTQILPF

SEQ ID NO: 48478 - protein, 10 aa, Artificial Sequence
  Description of Artificial Sequence: Synthetic epitope
SSTEEDTSKQ

SEQ ID NO: 48479 - protein, 10 aa, Artificial Sequence
  Description of Artificial Sequence: Synthetic epitope
SSTEKPTKAL

SEQ ID NO: 48480 - protein, 10 aa, Artificial Sequence
  Description of Artificial Sequence: Synthetic epitope
SSTENLAAGS

SEQ ID NO: 48481 - protein, 10 aa, Artificial Sequence
  Description of Artificial Sequence: Synthetic epitope
SSTERGIRSE

SEQ ID NO: 48482 - protein, 10 aa, Artificial Sequence
  Description of Artificial Sequence: Synthetic epitope
SSTESSDEEA

SEQ ID NO: 48483 - protein, 10 aa, Artificial Sequence
  Description of Artificial Sequence: Synthetic epitope
SSTETGSAEQ

SEQ ID NO: 48484 - protein, 10 aa, Artificial Sequence
  Description of Artificial Sequence: Synthetic epitope
SSTETKESSG

SEQ ID NO: 48485 - protein, 10 aa, Artificial Sequence
  Description of Artificial Sequence: Synthetic epitope
SSTEVLSTDT

SEQ ID NO: 48486 - protein, 10 aa, Artificial Sequence
  Description of Artificial Sequence: Synthetic epitope
SSTFPESANE

SEQ ID NO: 48487 - protein, 10 aa, Artificial Sequence
  Description of Artificial Sequence: Synthetic epitope
SSTFQTVQLT

SEQ ID NO: 48488 - protein, 10 aa, Artificial Sequence
  Description of Artificial Sequence: Synthetic epitope
SSTFSTILTQ

SEQ ID NO: 48489 - protein, 10 aa, Artificial Sequence
  Description of Artificial Sequence: Synthetic epitope
SSTFTAGEYN

SEQ ID NO: 48490 - protein, 10 aa, Artificial Sequence
  Description of Artificial Sequence: Synthetic epitope
SSTFVDTSVK

SEQ ID NO: 48491 - protein, 10 aa, Artificial Sequence
  Description of Artificial Sequence: Synthetic epitope
SSTHAAQMSA

SEQ ID NO: 48492 - protein, 10 aa, Artificial Sequence
  Description of Artificial Sequence: Synthetic epitope
SSTHNAMAPL

SEQ ID NO: 48493 - protein, 10 aa, Artificial Sequence
  Description of Artificial Sequence: Synthetic epitope
SSTILANIVN

SEQ ID NO: 48494 - protein, 10 aa, Artificial Sequence
  Description of Artificial Sequence: Synthetic epitope
SSTINNQAVE

SEQ ID NO: 48495 - protein, 10 aa, Artificial Sequence
  Description of Artificial Sequence: Synthetic epitope
SSTIQVAPAN

SEQ ID NO: 48496 - protein, 10 aa, Artificial Sequence
  Description of Artificial Sequence: Synthetic epitope
SSTITSDITN

SEQ ID NO: 48497 - protein, 10 aa, Artificial Sequence
  Description of Artificial Sequence: Synthetic epitope
SSTIVPSLKH

SEQ ID NO: 48498 - protein, 10 aa, Artificial Sequence
  Description of Artificial Sequence: Synthetic epitope
SSTKDITSAV

SEQ ID NO: 48499 - protein, 10 aa, Artificial Sequence
  Description of Artificial Sequence: Synthetic epitope
SSTKIIKEAM

SEQ ID NO: 48500 - protein, 10 aa, Artificial Sequence
  Description of Artificial Sequence: Synthetic epitope
SSTKLLMTSY

SEQ ID NO: 48501 - protein, 10 aa, Artificial Sequence
  Description of Artificial Sequence: Synthetic epitope
SSTKLTLLQR

SEQ ID NO: 48502 - protein, 10 aa, Artificial Sequence
  Description of Artificial Sequence: Synthetic epitope
SSTKSEGANG

SEQ ID NO: 48503 - protein, 10 aa, Artificial Sequence
  Description of Artificial Sequence: Synthetic epitope
SSTKSETRVP

SEQ ID NO: 48504 - protein, 10 aa, Artificial Sequence
  Description of Artificial Sequence: Synthetic epitope
SSTKTDSMPA

SEQ ID NO: 48505 - protein, 10 aa, Artificial Sequence
  Description of Artificial Sequence: Synthetic epitope
SSTKTPKDSL

SEQ ID NO: 48506 - protein, 10 aa, Artificial Sequence
  Description of Artificial Sequence: Synthetic epitope
SSTKVKNKSK

SEQ ID NO: 48507 - protein, 10 aa, Artificial Sequence
  Description of Artificial Sequence: Synthetic epitope
SSTLAEEVVA

SEQ ID NO: 48508 - protein, 10 aa, Artificial Sequence
  Description of Artificial Sequence: Synthetic epitope
SSTLAHSLAA

SEQ ID NO: 48509 - protein, 10 aa, Artificial Sequence
  Description of Artificial Sequence: Synthetic epitope
SSTLRSVSTG

SEQ ID NO: 48510 - protein, 10 aa, Artificial Sequence
  Description of Artificial Sequence: Synthetic epitope
SSTLVDELES

SEQ ID NO: 48511 - protein, 10 aa, Artificial Sequence
  Description of Artificial Sequence: Synthetic epitope
SSTMISVLRA

SEQ ID NO: 48512 - protein, 10 aa, Artificial Sequence
  Description of Artificial Sequence: Synthetic epitope
SSTMPAISEL

SEQ ID NO: 48513 - protein, 10 aa, Artificial Sequence
  Description of Artificial Sequence: Synthetic epitope
SSTNAQQSAP

SEQ ID NO: 48514 - protein, 10 aa, Artificial Sequence
  Description of Artificial Sequence: Synthetic epitope
SSTNFAMKRD

SEQ ID NO: 48515 - protein, 10 aa, Artificial Sequence
  Description of Artificial Sequence: Synthetic epitope
SSTNKNISAK

SEQ ID NO: 48516 - protein, 10 aa, Artificial Sequence
  Description of Artificial Sequence: Synthetic epitope
SSTNLESMDT

SEQ ID NO: 48517 - protein, 10 aa, Artificial Sequence
  Description of Artificial Sequence: Synthetic epitope
SSTNLVTPPA

SEQ ID NO: 48518 - protein, 10 aa, Artificial Sequence
  Description of Artificial Sequence: Synthetic epitope
SSTNNSRTKR

SEQ ID NO: 48519 - protein, 10 aa, Artificial Sequence
  Description of Artificial Sequence: Synthetic epitope
SSTNRESHEA

SEQ ID NO: 48520 - protein, 10 aa, Artificial Sequence
  Description of Artificial Sequence: Synthetic epitope
SSTNTSLLTS

SEQ ID NO: 48521 - protein, 10 aa, Artificial Sequence
  Description of Artificial Sequence: Synthetic epitope
SSTPAHEVGR

SEQ ID NO: 48522 - protein, 10 aa, Artificial Sequence
  Description of Artificial Sequence: Synthetic epitope
SSTPAKTQPA

SEQ ID NO: 48523 - protein, 10 aa, Artificial Sequence
  Description of Artificial Sequence: Synthetic epitope
SSTPIASSTT

SEQ ID NO: 48524 - protein, 10 aa, Artificial Sequence
  Description of Artificial Sequence: Synthetic epitope
SSTPSVASVV

SEQ ID NO: 48525 - protein, 10 aa, Artificial Sequence
  Description of Artificial Sequence: Synthetic epitope
SSTPTSQINT

SEQ ID NO: 48526 - protein, 10 aa, Artificial Sequence
  Description of Artificial Sequence: Synthetic epitope
SSTQDSMEVG

SEQ ID NO: 48527 - protein, 10 aa, Artificial Sequence
  Description of Artificial Sequence: Synthetic epitope
SSTQEIDSGK

SEQ ID NO: 48528 - protein, 10 aa, Artificial Sequence
  Description of Artificial Sequence: Synthetic epitope
SSTQGARAQQ

SEQ ID NO: 48529 - protein, 10 aa, Artificial Sequence
  Description of Artificial Sequence: Synthetic epitope
SSTRASSVPI

SEQ ID NO: 48530 - protein, 10 aa, Artificial Sequence
  Description of Artificial Sequence: Synthetic epitope
SSTRNSKSNV

SEQ ID NO: 48531 - protein, 10 aa, Artificial Sequence
  Description of Artificial Sequence: Synthetic epitope
SSTRSAVDMA

SEQ ID NO: 48532 - protein, 10 aa, Artificial Sequence
  Description of Artificial Sequence: Synthetic epitope
SSTRSIDTQT

SEQ ID NO: 48533 - protein, 10 aa, Artificial Sequence
  Description of Artificial Sequence: Synthetic epitope
SSTSAATVDP

SEQ ID NO: 48534 - protein, 10 aa, Artificial Sequence
  Description of Artificial Sequence: Synthetic epitope
SSTSASVQLP

SEQ ID NO: 48535 - protein, 10 aa, Artificial Sequence
  Description of Artificial Sequence: Synthetic epitope
SSTSEITPIS

SEQ ID NO: 48536 - protein, 10 aa, Artificial Sequence
  Description of Artificial Sequence: Synthetic epitope
SSTSELATAS

SEQ ID NO: 48537 - protein, 10 aa, Artificial Sequence
  Description of Artificial Sequence: Synthetic epitope
SSTSFESGTN

SEQ ID NO: 48538 - protein, 10 aa, Artificial Sequence
  Description of Artificial Sequence: Synthetic epitope
SSTSGAHVDS

SEQ ID NO: 48539 - protein, 10 aa, Artificial Sequence
  Description of Artificial Sequence: Synthetic epitope
SSTSHRNYSF

SEQ ID NO: 48540 - protein, 10 aa, Artificial Sequence
  Description of Artificial Sequence: Synthetic epitope
SSTSMKGSQP

SEQ ID NO: 48541 - protein, 10 aa, Artificial Sequence
  Description of Artificial Sequence: Synthetic epitope
SSTSMNVYSL

SEQ ID NO: 48542 - protein, 10 aa, Artificial Sequence
  Description of Artificial Sequence: Synthetic epitope
SSTSQGKARA

SEQ ID NO: 48543 - protein, 10 aa, Artificial Sequence
  Description of Artificial Sequence: Synthetic epitope
SSTSQISLRN

SEQ ID NO: 48544 - protein, 10 aa, Artificial Sequence
  Description of Artificial Sequence: Synthetic epitope
SSTSRNQVAS

SEQ ID NO: 48545 - protein, 10 aa, Artificial Sequence
  Description of Artificial Sequence: Synthetic epitope
SSTSTPTLAE

SEQ ID NO: 48546 - protein, 10 aa, Artificial Sequence
  Description of Artificial Sequence: Synthetic epitope
SSTTDASAGP

SEQ ID NO: 48547 - protein, 10 aa, Artificial Sequence
  Description of Artificial Sequence: Synthetic epitope
SSTTDSAESE

SEQ ID NO: 48548 - protein, 10 aa, Artificial Sequence
  Description of Artificial Sequence: Synthetic epitope
SSTTGESVIT

SEQ ID NO: 48549 - protein, 10 aa, Artificial Sequence
  Description of Artificial Sequence: Synthetic epitope
SSTTGSSTER

SEQ ID NO: 48550 - protein, 10 aa, Artificial Sequence
  Description of Artificial Sequence: Synthetic epitope
SSTTKEKETK

SEQ ID NO: 48551 - protein, 10 aa, Artificial Sequence
  Description of Artificial Sequence: Synthetic epitope
SSTTPTSANS

SEQ ID NO: 48552 - protein, 10 aa, Artificial Sequence
  Description of Artificial Sequence: Synthetic epitope
SSTTSSEGTV

SEQ ID NO: 48553 - protein, 10 aa, Artificial Sequence
  Description of Artificial Sequence: Synthetic epitope
SSTTSSKPKL

SEQ ID NO: 48554 - protein, 10 aa, Artificial Sequence
  Description of Artificial Sequence: Synthetic epitope
SSTTSTSFKP

SEQ ID NO: 48555 - protein, 10 aa, Artificial Sequence
  Description of Artificial Sequence: Synthetic epitope
SSTVESISLQ

SEQ ID NO: 48556 - protein, 10 aa, Artificial Sequence
  Description of Artificial Sequence: Synthetic epitope
SSTVFDLVEE

SEQ ID NO: 48557 - protein, 10 aa, Artificial Sequence
  Description of Artificial Sequence: Synthetic epitope
SSTVHSENSH

SEQ ID NO: 48558 - protein, 10 aa, Artificial Sequence
  Description of Artificial Sequence: Synthetic epitope
SSTVLASVEA

SEQ ID NO: 48559 - protein, 10 aa, Artificial Sequence
  Description of Artificial Sequence: Synthetic epitope
SSTVLGKVIV

SEQ ID NO: 48560 - protein, 10 aa, Artificial Sequence
  Description of Artificial Sequence: Synthetic epitope
SSTVRQIISK

SEQ ID NO: 48561 - protein, 10 aa, Artificial Sequence
  Description of Artificial Sequence: Synthetic epitope
SSTVSEAVAE

SEQ ID NO: 48562 - protein, 10 aa, Artificial Sequence
  Description of Artificial Sequence: Synthetic epitope
SSTVSGLQRQ

SEQ ID NO: 48563 - protein, 10 aa, Artificial Sequence
  Description of Artificial Sequence: Synthetic epitope
SSTVSQRRKR

SEQ ID NO: 48564 - protein, 10 aa, Artificial Sequence
  Description of Artificial Sequence: Synthetic epitope
SSTVSRAPER

SEQ ID NO: 48565 - protein, 10 aa, Artificial Sequence
  Description of Artificial Sequence: Synthetic epitope
SSTVTARIDR

SEQ ID NO: 48566 - protein, 10 aa, Artificial Sequence
  Description of Artificial Sequence: Synthetic epitope
SSTVTTAKTS

SEQ ID NO: 48567 - protein, 10 aa, Artificial Sequence
  Description of Artificial Sequence: Synthetic epitope
SSTVTTSSTD

SEQ ID NO: 48568 - protein, 10 aa, Artificial Sequence
  Description of Artificial Sequence: Synthetic epitope
SSTWQKFAAN

SEQ ID NO: 48569 - protein, 10 aa, Artificial Sequence
  Description of Artificial Sequence: Synthetic epitope
SSTYDEQFQG

SEQ ID NO: 48570 - protein, 10 aa, Artificial Sequence
  Description of Artificial Sequence: Synthetic epitope
SSTYVTSSEA

SEQ ID NO: 48571 - protein, 10 aa, Artificial Sequence
  Description of Artificial Sequence: Synthetic epitope
SSVAAKVRAA

SEQ ID NO: 48572 - protein, 10 aa, Artificial Sequence
  Description of Artificial Sequence: Synthetic epitope
SSVAASSGNT

SEQ ID NO: 48573 - protein, 10 aa, Artificial Sequence
  Description of Artificial Sequence: Synthetic epitope
SSVAEKAVEA

SEQ ID NO: 48574 - protein, 10 aa, Artificial Sequence
  Description of Artificial Sequence: Synthetic epitope
SSVALAVASV

SEQ ID NO: 48575 - protein, 10 aa, Artificial Sequence
  Description of Artificial Sequence: Synthetic epitope
SSVALKAKAP

SEQ ID NO: 48576 - protein, 10 aa, Artificial Sequence
  Description of Artificial Sequence: Synthetic epitope
SSVAMGASLS

SEQ ID NO: 48577 - protein, 10 aa, Artificial Sequence
  Description of Artificial Sequence: Synthetic epitope
SSVAVTEATG

SEQ ID NO: 48578 - protein, 10 aa, Artificial Sequence
  Description of Artificial Sequence: Synthetic epitope
SSVDASEQTE

SEQ ID NO: 48579 - protein, 10 aa, Artificial Sequence
  Description of Artificial Sequence: Synthetic epitope
SSVDEKARIV

SEQ ID NO: 48580 - protein, 10 aa, Artificial Sequence
  Description of Artificial Sequence: Synthetic epitope
SSVDETQVRS

SEQ ID NO: 48581 - protein, 10 aa, Artificial Sequence
  Description of Artificial Sequence: Synthetic epitope
SSVDSELTSL

SEQ ID NO: 48582 - protein, 10 aa, Artificial Sequence
  Description of Artificial Sequence: Synthetic epitope
SSVDTEETIE

SEQ ID NO: 48583 - protein, 10 aa, Artificial Sequence
  Description of Artificial Sequence: Synthetic epitope
SSVEDIDAGA

SEQ ID NO: 48584 - protein, 10 aa, Artificial Sequence
  Description of Artificial Sequence: Synthetic epitope
SSVEEKPLSH

SEQ ID NO: 48585 - protein, 10 aa, Artificial Sequence
  Description of Artificial Sequence: Synthetic epitope
SSVEGSKEFT

SEQ ID NO: 48586 - protein, 10 aa, Artificial Sequence
  Description of Artificial Sequence: Synthetic epitope
SSVELPLDAD

SEQ ID NO: 48587 - protein, 10 aa, Artificial Sequence
  Description of Artificial Sequence: Synthetic epitope
SSVEYNIMEL

SEQ ID NO: 48588 - protein, 10 aa, Artificial Sequence
  Description of Artificial Sequence: Synthetic epitope
SSVGAPVEVT

SEQ ID NO: 48589 - protein, 10 aa, Artificial Sequence
  Description of Artificial Sequence: Synthetic epitope
SSVGIEDKKM

SEQ ID NO: 48590 - protein, 10 aa, Artificial Sequence
  Description of Artificial Sequence: Synthetic epitope
SSVGSNSLED

SEQ ID NO: 48591 - protein, 10 aa, Artificial Sequence
  Description of Artificial Sequence: Synthetic epitope
SSVGSVLQAG

SEQ ID NO: 48592 - protein, 10 aa, Artificial Sequence
  Description of Artificial Sequence: Synthetic epitope
SSVHKQEKTA

SEQ ID NO: 48593 - protein, 10 aa, Artificial Sequence
  Description of Artificial Sequence: Synthetic epitope
SSVIVTRTTI

SEQ ID NO: 48594 - protein, 10 aa, Artificial Sequence
  Description of Artificial Sequence: Synthetic epitope
SSVKETSANK

SEQ ID NO: 48595 - protein, 10 aa, Artificial Sequence
  Description of Artificial Sequence: Synthetic epitope
SSVKKFAQEQ

SEQ ID NO: 48596 - protein, 10 aa, Artificial Sequence
  Description of Artificial Sequence: Synthetic epitope
SSVKLEAGLA

SEQ ID NO: 48597 - protein, 10 aa, Artificial Sequence
  Description of Artificial Sequence: Synthetic epitope
SSVKRMANSS

SEQ ID NO: 48598 - protein, 10 aa, Artificial Sequence
  Description of Artificial Sequence: Synthetic epitope
SSVKRSLKQE

SEQ ID NO: 48599 - protein, 10 aa, Artificial Sequence
  Description of Artificial Sequence: Synthetic epitope
SSVKSISRAK

SEQ ID NO: 48600 - protein, 10 aa, Artificial Sequence
  Description of Artificial Sequence: Synthetic epitope
SSVKSLSQEM

SEQ ID NO: 48601 - protein, 10 aa, Artificial Sequence
  Description of Artificial Sequence: Synthetic epitope
SSVLAAVVFE

SEQ ID NO: 48602 - protein, 10 aa, Artificial Sequence
  Description of Artificial Sequence: Synthetic epitope
SSVLSLLQSV

SEQ ID NO: 48603 - protein, 10 aa, Artificial Sequence
  Description of Artificial Sequence: Synthetic epitope
SSVLSLSELP

SEQ ID NO: 48604 - protein, 10 aa, Artificial Sequence
  Description of Artificial Sequence: Synthetic epitope
SSVLSVTRPV

SEQ ID NO: 48605 - protein, 10 aa, Artificial Sequence
  Description of Artificial Sequence: Synthetic epitope
SSVNAAPTSF

SEQ ID NO: 48606 - protein, 10 aa, Artificial Sequence
  Description of Artificial Sequence: Synthetic epitope
SSVNSLSNTI

SEQ ID NO: 48607 - protein, 10 aa, Artificial Sequence
  Description of Artificial Sequence: Synthetic epitope
SSVNSSAYTI

SEQ ID NO: 48608 - protein, 10 aa, Artificial Sequence
  Description of Artificial Sequence: Synthetic epitope
SSVPKRASRY

SEQ ID NO: 48609 - protein, 10 aa, Artificial Sequence
  Description of Artificial Sequence: Synthetic epitope
SSVPQMKKIS

SEQ ID NO: 48610 - protein, 10 aa, Artificial Sequence
  Description of Artificial Sequence: Synthetic epitope
SSVQAATVTV

SEQ ID NO: 48611 - protein, 10 aa, Artificial Sequence
  Description of Artificial Sequence: Synthetic epitope
SSVQIPSRKQ

SEQ ID NO: 48612 - protein, 10 aa, Artificial Sequence
  Description of Artificial Sequence: Synthetic epitope
SSVQSSEQIE

SEQ ID NO: 48613 - protein, 10 aa, Artificial Sequence
  Description of Artificial Sequence: Synthetic epitope
SSVQVNAMSS

SEQ ID NO: 48614 - protein, 10 aa, Artificial Sequence
  Description of Artificial Sequence: Synthetic epitope
SSVRTEALSV

SEQ ID NO: 48615 - protein, 10 aa, Artificial Sequence
  Description of Artificial Sequence: Synthetic epitope
SSVSASAEGA

SEQ ID NO: 48616 - protein, 10 aa, Artificial Sequence
  Description of Artificial Sequence: Synthetic epitope
SSVSELTNKE

SEQ ID NO: 48617 - protein, 10 aa, Artificial Sequence
  Description of Artificial Sequence: Synthetic epitope
SSVSGSLQQE

SEQ ID NO: 48618 - protein, 10 aa, Artificial Sequence
  Description of Artificial Sequence: Synthetic epitope
SSVSKVQSHG

SEQ ID NO: 48619 - protein, 10 aa, Artificial Sequence
  Description of Artificial Sequence: Synthetic epitope
SSVSLHAERT

SEQ ID NO: 48620 - protein, 10 aa, Artificial Sequence
  Description of Artificial Sequence: Synthetic epitope
SSVSLTATFR

SEQ ID NO: 48621 - protein, 10 aa, Artificial Sequence
  Description of Artificial Sequence: Synthetic epitope
SSVSNNKRIV

SEQ ID NO: 48622 - protein, 10 aa, Artificial Sequence
  Description of Artificial Sequence: Synthetic epitope
SSVSQESQNI

SEQ ID NO: 48623 - protein, 10 aa, Artificial Sequence
  Description of Artificial Sequence: Synthetic epitope
SSVSRVGKAI

SEQ ID NO: 48624 - protein, 10 aa, Artificial Sequence
  Description of Artificial Sequence: Synthetic epitope
SSVSTETSEV

SEQ ID NO: 48625 - protein, 10 aa, Artificial Sequence
  Description of Artificial Sequence: Synthetic epitope
SSVSTIDTAR

SEQ ID NO: 48626 - protein, 10 aa, Artificial Sequence
  Description of Artificial Sequence: Synthetic epitope
SSVSTLSHYT

SEQ ID NO: 48627 - protein, 10 aa, Artificial Sequence
  Description of Artificial Sequence: Synthetic epitope
SSVSTSDLKN

SEQ ID NO: 48628 - protein, 10 aa, Artificial Sequence
  Description of Artificial Sequence: Synthetic epitope
SSVSTTSEPE

SEQ ID NO: 48629 - protein, 10 aa, Artificial Sequence
  Description of Artificial Sequence: Synthetic epitope
SSVTAGVASS

SEQ ID NO: 48630 - protein, 10 aa, Artificial Sequence
  Description of Artificial Sequence: Synthetic epitope
SSVTGLTNIE

SEQ ID NO: 48631 - protein, 10 aa, Artificial Sequence
  Description of Artificial Sequence: Synthetic epitope
SSVTNATSIQ

SEQ ID NO: 48632 - protein, 10 aa, Artificial Sequence
  Description of Artificial Sequence: Synthetic epitope
SSVTNTLMMT

SEQ ID NO: 48633 - protein, 10 aa, Artificial Sequence
  Description of Artificial Sequence: Synthetic epitope
SSVTQVEVDE

SEQ ID NO: 48634 - protein, 10 aa, Artificial Sequence
  Description of Artificial Sequence: Synthetic epitope
SSVTSIDKES

SEQ ID NO: 48635 - protein, 10 aa, Artificial Sequence
  Description of Artificial Sequence: Synthetic epitope
SSVTTSETQP

SEQ ID NO: 48636 - protein, 10 aa, Artificial Sequence
  Description of Artificial Sequence: Synthetic epitope
SSVVAASQQL

SEQ ID NO: 48637 - protein, 10 aa, Artificial Sequence
  Description of Artificial Sequence: Synthetic epitope
SSVVAGTARF

SEQ ID NO: 48638 - protein, 10 aa, Artificial Sequence
  Description of Artificial Sequence: Synthetic epitope
SSVVDTQSKH

SEQ ID NO: 48639 - protein, 10 aa, Artificial Sequence
  Description of Artificial Sequence: Synthetic epitope
SSVVSAATDT

SEQ ID NO: 48640 - protein, 10 aa, Artificial Sequence
  Description of Artificial Sequence: Synthetic epitope
SSVWKRETIV

SEQ ID NO: 48641 - protein, 10 aa, Artificial Sequence
  Description of Artificial Sequence: Synthetic epitope
SSWFIFQKNM

SEQ ID NO: 48642 - protein, 10 aa, Artificial Sequence
  Description of Artificial Sequence: Synthetic epitope
SSWFSAPTVG

SEQ ID NO: 48643 - protein, 10 aa, Artificial Sequence
  Description of Artificial Sequence: Synthetic epitope
SSWIVFQPDI

SEQ ID NO: 48644 - protein, 10 aa, Artificial Sequence
  Description of Artificial Sequence: Synthetic epitope
SSWLQKASGS

SEQ ID NO: 48645 - protein, 10 aa, Artificial Sequence
  Description of Artificial Sequence: Synthetic epitope
SSWQASETED

SEQ ID NO: 48646 - protein, 10 aa, Artificial Sequence
  Description of Artificial Sequence: Synthetic epitope
SSWQKKSQEP

SEQ ID NO: 48647 - protein, 10 aa, Artificial Sequence
  Description of Artificial Sequence: Synthetic epitope
SSWQSVNESG

SEQ ID NO: 48648 - protein, 10 aa, Artificial Sequence
  Description of Artificial Sequence: Synthetic epitope
SSYASQHSQL

SEQ ID NO: 48649 - protein, 10 aa, Artificial Sequence
  Description of Artificial Sequence: Synthetic epitope
SSYEALKGKK

SEQ ID NO: 48650 - protein, 10 aa, Artificial Sequence
  Description of Artificial Sequence: Synthetic epitope
SSYFKDSESA

SEQ ID NO: 48651 - protein, 10 aa, Artificial Sequence
  Description of Artificial Sequence: Synthetic epitope
SSYIKVVKAF

SEQ ID NO: 48652 - protein, 10 aa, Artificial Sequence
  Description of Artificial Sequence: Synthetic epitope
SSYKLLVEQA

SEQ ID NO: 48653 - protein, 10 aa, Artificial Sequence
  Description of Artificial Sequence: Synthetic epitope
SSYNGLVESF

SEQ ID NO: 48654 - protein, 10 aa, Artificial Sequence
  Description of Artificial Sequence: Synthetic epitope
SSYNIVTKFE

SEQ ID NO: 48655 - protein, 10 aa, Artificial Sequence
  Description of Artificial Sequence: Synthetic epitope
SSYQSKQRVE

SEQ ID NO: 48656 - protein, 10 aa, Artificial Sequence
  Description of Artificial Sequence: Synthetic epitope
SSYRQKPYQQ

SEQ ID NO: 48657 - protein, 10 aa, Artificial Sequence
  Description of Artificial Sequence: Synthetic epitope
SSYSNREKAS

SEQ ID NO: 48658 - protein, 10 aa, Artificial Sequence
  Description of Artificial Sequence: Synthetic epitope
SSYSSKYAPH

SEQ ID NO: 48659 - protein, 10 aa, Artificial Sequence
  Description of Artificial Sequence: Synthetic epitope
SSYSTSEAAP

SEQ ID NO: 48660 - protein, 10 aa, Artificial Sequence
  Description of Artificial Sequence: Synthetic epitope
SSYTRKSQFQ

SEQ ID NO: 48661 - protein, 10 aa, Artificial Sequence
  Description of Artificial Sequence: Synthetic epitope
SSYYLAVSDL

SEQ ID NO: 48662 - protein, 10 aa, Artificial Sequence
  Description of Artificial Sequence: Synthetic epitope
STAAETLDLP

SEQ ID NO: 48663 - protein, 10 aa, Artificial Sequence
  Description of Artificial Sequence: Synthetic epitope
STAALTSQTG

SEQ ID NO: 48664 - protein, 10 aa, Artificial Sequence
  Description of Artificial Sequence: Synthetic epitope
STAAVLSGLS

SEQ ID NO: 48665 - protein, 10 aa, Artificial Sequence
  Description of Artificial Sequence: Synthetic epitope
STAAVPELKQ

SEQ ID NO: 48666 - protein, 10 aa, Artificial Sequence
  Description of Artificial Sequence: Synthetic epitope
STADAYNSHL

SEQ ID NO: 48667 - protein, 10 aa, Artificial Sequence
  Description of Artificial Sequence: Synthetic epitope
STADNVLTLS

SEQ ID NO: 48668 - protein, 10 aa, Artificial Sequence
  Description of Artificial Sequence: Synthetic epitope
STAEDALSIR

SEQ ID NO: 48669 - protein, 10 aa, Artificial Sequence
  Description of Artificial Sequence: Synthetic epitope
STAEDLRTRK

SEQ ID NO: 48670 - protein, 10 aa, Artificial Sequence
  Description of Artificial Sequence: Synthetic epitope
STAEEKAHSE

SEQ ID NO: 48671 - protein, 10 aa, Artificial Sequence
  Description of Artificial Sequence: Synthetic epitope
STAEVELVST

SEQ ID NO: 48672 - protein, 10 aa, Artificial Sequence
  Description of Artificial Sequence: Synthetic epitope
STAGKSSESR

SEQ ID NO: 48673 - protein, 10 aa, Artificial Sequence
  Description of Artificial Sequence: Synthetic epitope
STAGKYLSDS

SEQ ID NO: 48674 - protein, 10 aa, Artificial Sequence
  Description of Artificial Sequence: Synthetic epitope
STAGLGRQTV

SEQ ID NO: 48675 - protein, 10 aa, Artificial Sequence
  Description of Artificial Sequence: Synthetic epitope
STAHMSVTGE

SEQ ID NO: 48676 - protein, 10 aa, Artificial Sequence
  Description of Artificial Sequence: Synthetic epitope
STAIELVQTN

SEQ ID NO: 48677 - protein, 10 aa, Artificial Sequence
  Description of Artificial Sequence: Synthetic epitope
STAIELVQTN

SEQ ID NO: 48678 - protein, 10 aa, Artificial Sequence
  Description of Artificial Sequence: Synthetic epitope
STAITVSGTH

SEQ ID NO: 48679 - protein, 10 aa, Artificial Sequence
  Description of Artificial Sequence: Synthetic epitope
STALARSSKV

SEQ ID NO: 48680 - protein, 10 aa, Artificial Sequence
  Description of Artificial Sequence: Synthetic epitope
STALSAIAQW

SEQ ID NO: 48681 - protein, 10 aa, Artificial Sequence
  Description of Artificial Sequence: Synthetic epitope
STAPGMKFKT

SEQ ID NO: 48682 - protein, 10 aa, Artificial Sequence
  Description of Artificial Sequence: Synthetic epitope
STAQAQAAVQ

SEQ ID NO: 48683 - protein, 10 aa, Artificial Sequence
  Description of Artificial Sequence: Synthetic epitope
STAQQEVMAD

SEQ ID NO: 48684 - protein, 10 aa, Artificial Sequence
  Description of Artificial Sequence: Synthetic epitope
STARSRITKY

SEQ ID NO: 48685 - protein, 10 aa, Artificial Sequence
  Description of Artificial Sequence: Synthetic epitope
STASEAASYE

SEQ ID NO: 48686 - protein, 10 aa, Artificial Sequence
  Description of Artificial Sequence: Synthetic epitope
STASFLSHHS

SEQ ID NO: 48687 - protein, 10 aa, Artificial Sequence
  Description of Artificial Sequence: Synthetic epitope
STASGAASVG

SEQ ID NO: 48688 - protein, 10 aa, Artificial Sequence
  Description of Artificial Sequence: Synthetic epitope
STASIKDLAD

SEQ ID NO: 48689 - protein, 10 aa, Artificial Sequence
  Description of Artificial Sequence: Synthetic epitope
STASKKLSEK

SEQ ID NO: 48690 - protein, 10 aa, Artificial Sequence
  Description of Artificial Sequence: Synthetic epitope
STASLVLRAT

SEQ ID NO: 48691 - protein, 10 aa, Artificial Sequence
  Description of Artificial Sequence: Synthetic epitope
STASPTSSVD

SEQ ID NO: 48692 - protein, 10 aa, Artificial Sequence
  Description of Artificial Sequence: Synthetic epitope
STASTSFSEP

SEQ ID NO: 48693 - protein, 10 aa, Artificial Sequence
  Description of Artificial Sequence: Synthetic epitope
STASTTQEGE

SEQ ID NO: 48694 - protein, 10 aa, Artificial Sequence
  Description of Artificial Sequence: Synthetic epitope
STATAGKKSP

SEQ ID NO: 48695 - protein, 10 aa, Artificial Sequence
  Description of Artificial Sequence: Synthetic epitope
STATKNLDSL

SEQ ID NO: 48696 - protein, 10 aa, Artificial Sequence
  Description of Artificial Sequence: Synthetic epitope
STATKSTATS

SEQ ID NO: 48697 - protein, 10 aa, Artificial Sequence
  Description of Artificial Sequence: Synthetic epitope
STATKTLDKR

SEQ ID NO: 48698 - protein, 10 aa, Artificial Sequence
  Description of Artificial Sequence: Synthetic epitope
STATTQMFHE

SEQ ID NO: 48699 - protein, 10 aa, Artificial Sequence
  Description of Artificial Sequence: Synthetic epitope
STDAALQQLY

SEQ ID NO: 48700 - protein, 10 aa, Artificial Sequence
  Description of Artificial Sequence: Synthetic epitope
STDAASVVHS

SEQ ID NO: 48701 - protein, 10 aa, Artificial Sequence
  Description of Artificial Sequence: Synthetic epitope
STDAPTSAPS

SEQ ID NO: 48702 - protein, 10 aa, Artificial Sequence
  Description of Artificial Sequence: Synthetic epitope
STDASRRSSE

SEQ ID NO: 48703 - protein, 10 aa, Artificial Sequence
  Description of Artificial Sequence: Synthetic epitope
STDASRRSSE

SEQ ID NO: 48704 - protein, 10 aa, Artificial Sequence
  Description of Artificial Sequence: Synthetic epitope
STDDQQKIQA

SEQ ID NO: 48705 - protein, 10 aa, Artificial Sequence
  Description of Artificial Sequence: Synthetic epitope
STDESEDIES

SEQ ID NO: 48706 - protein, 10 aa, Artificial Sequence
  Description of Artificial Sequence: Synthetic epitope
STDFKMVSSG

SEQ ID NO: 48707 - protein, 10 aa, Artificial Sequence
  Description of Artificial Sequence: Synthetic epitope
STDLEELKNA

SEQ ID NO: 48708 - protein, 10 aa, Artificial Sequence
  Description of Artificial Sequence: Synthetic epitope
STDLNIQEIM

SEQ ID NO: 48709 - protein, 10 aa, Artificial Sequence
  Description of Artificial Sequence: Synthetic epitope
STDPAKDRIE

SEQ ID NO: 48710 - protein, 10 aa, Artificial Sequence
  Description of Artificial Sequence: Synthetic epitope
STDPSQAQVP

SEQ ID NO: 48711 - protein, 10 aa, Artificial Sequence
  Description of Artificial Sequence: Synthetic epitope
STDSAASASA

SEQ ID NO: 48712 - protein, 10 aa, Artificial Sequence
  Description of Artificial Sequence: Synthetic epitope
STDSKEANLQ

SEQ ID NO: 48713 - protein, 10 aa, Artificial Sequence
  Description of Artificial Sequence: Synthetic epitope
STDSRLDKEV

SEQ ID NO: 48714 - protein, 10 aa, Artificial Sequence
  Description of Artificial Sequence: Synthetic epitope
STDTVTQGSQ

SEQ ID NO: 48715 - protein, 10 aa, Artificial Sequence
  Description of Artificial Sequence: Synthetic epitope
STDVEAAVNS

SEQ ID NO: 48716 - protein, 10 aa, Artificial Sequence
  Description of Artificial Sequence: Synthetic epitope
STDVKRAGSH

SEQ ID NO: 48717 - protein, 10 aa, Artificial Sequence
  Description of Artificial Sequence: Synthetic epitope
STDVQNTPVN

SEQ ID NO: 48718 - protein, 10 aa, Artificial Sequence
  Description of Artificial Sequence: Synthetic epitope
STEALTIVKD

SEQ ID NO: 48719 - protein, 10 aa, Artificial Sequence
  Description of Artificial Sequence: Synthetic epitope
STEAPAQLSS

SEQ ID NO: 48720 - protein, 10 aa, Artificial Sequence
  Description of Artificial Sequence: Synthetic epitope
STEASKEPSP

SEQ ID NO: 48721 - protein, 10 aa, Artificial Sequence
  Description of Artificial Sequence: Synthetic epitope
STEAVAGSAP

SEQ ID NO: 48722 - protein, 10 aa, Artificial Sequence
  Description of Artificial Sequence: Synthetic epitope
STEDSTEGTA

SEQ ID NO: 48723 - protein, 10 aa, Artificial Sequence
  Description of Artificial Sequence: Synthetic epitope
STEEATEATE

SEQ ID NO: 48724 - protein, 10 aa, Artificial Sequence
  Description of Artificial Sequence: Synthetic epitope
STEEDEASKE

SEQ ID NO: 48725 - protein, 10 aa, Artificial Sequence
  Description of Artificial Sequence: Synthetic epitope
STEFRAQPLA

SEQ ID NO: 48726 - protein, 10 aa, Artificial Sequence
  Description of Artificial Sequence: Synthetic epitope
STEIFGVENE

SEQ ID NO: 48727 - protein, 10 aa, Artificial Sequence
  Description of Artificial Sequence: Synthetic epitope
STEKVPKGGD

SEQ ID NO: 48728 - protein, 10 aa, Artificial Sequence
  Description of Artificial Sequence: Synthetic epitope
STELAAYKEE

SEQ ID NO: 48729 - protein, 10 aa, Artificial Sequence
  Description of Artificial Sequence: Synthetic epitope
STELSALENI

SEQ ID NO: 48730 - protein, 10 aa, Artificial Sequence
  Description of Artificial Sequence: Synthetic epitope
STELYSVDQE

SEQ ID NO: 48731 - protein, 10 aa, Artificial Sequence
  Description of Artificial Sequence: Synthetic epitope
STENDSTLVH

SEQ ID NO: 48732 - protein, 10 aa, Artificial Sequence
  Description of Artificial Sequence: Synthetic epitope
STENSNEVQV

SEQ ID NO: 48733 - protein, 10 aa, Artificial Sequence
  Description of Artificial Sequence: Synthetic epitope
STEPGISNIK

SEQ ID NO: 48734 - protein, 10 aa, Artificial Sequence
  Description of Artificial Sequence: Synthetic epitope
STEQIRATTP

SEQ ID NO: 48735 - protein, 10 aa, Artificial Sequence
  Description of Artificial Sequence: Synthetic epitope
STEQRLSDLN

SEQ ID NO: 48736 - protein, 10 aa, Artificial Sequence
  Description of Artificial Sequence: Synthetic epitope
STEQSLMMGL

SEQ ID NO: 48737 - protein, 10 aa, Artificial Sequence
  Description of Artificial Sequence: Synthetic epitope
STEQSSASRL

SEQ ID NO: 48738 - protein, 10 aa, Artificial Sequence
  Description of Artificial Sequence: Synthetic epitope
STEQSSASRL

SEQ ID NO: 48739 - protein, 10 aa, Artificial Sequence
  Description of Artificial Sequence: Synthetic epitope
STEQSTSSRL

SEQ ID NO: 48740 - protein, 10 aa, Artificial Sequence
  Description of Artificial Sequence: Synthetic epitope
STEQSTSSRL

SEQ ID NO: 48741 - protein, 10 aa, Artificial Sequence
  Description of Artificial Sequence: Synthetic epitope
STEQTAQLGT

SEQ ID NO: 48742 - protein, 10 aa, Artificial Sequence
  Description of Artificial Sequence: Synthetic epitope
STERKTNSLP

SEQ ID NO: 48743 - protein, 10 aa, Artificial Sequence
  Description of Artificial Sequence: Synthetic epitope
STERQEKAKI

SEQ ID NO: 48744 - protein, 10 aa, Artificial Sequence
  Description of Artificial Sequence: Synthetic epitope
STESSETSTG

SEQ ID NO: 48745 - protein, 10 aa, Artificial Sequence
  Description of Artificial Sequence: Synthetic epitope
STETLKLRRK

SEQ ID NO: 48746 - protein, 10 aa, Artificial Sequence
  Description of Artificial Sequence: Synthetic epitope
STEVSVKTKK

SEQ ID NO: 48747 - protein, 10 aa, Artificial Sequence
  Description of Artificial Sequence: Synthetic epitope
STFAMRSLAS

SEQ ID NO: 48748 - protein, 10 aa, Artificial Sequence
  Description of Artificial Sequence: Synthetic epitope
STFEIGESQH

SEQ ID NO: 48749 - protein, 10 aa, Artificial Sequence
  Description of Artificial Sequence: Synthetic epitope
STFESESKKE

SEQ ID NO: 48750 - protein, 10 aa, Artificial Sequence
  Description of Artificial Sequence: Synthetic epitope
STFETQSLKE

SEQ ID NO: 48751 - protein, 10 aa, Artificial Sequence
  Description of Artificial Sequence: Synthetic epitope
STFFSRRSSQ

SEQ ID NO: 48752 - protein, 10 aa, Artificial Sequence
  Description of Artificial Sequence: Synthetic epitope
STFIPRKPMK

SEQ ID NO: 48753 - protein, 10 aa, Artificial Sequence
  Description of Artificial Sequence: Synthetic epitope
STFLTIMHMQ

SEQ ID NO: 48754 - protein, 10 aa, Artificial Sequence
  Description of Artificial Sequence: Synthetic epitope
STFQGETSAD

SEQ ID NO: 48755 - protein, 10 aa, Artificial Sequence
  Description of Artificial Sequence: Synthetic epitope
STFSKSTATE

SEQ ID NO: 48756 - protein, 10 aa, Artificial Sequence
  Description of Artificial Sequence: Synthetic epitope
STFTTSTSQS

SEQ ID NO: 48757 - protein, 10 aa, Artificial Sequence
  Description of Artificial Sequence: Synthetic epitope
STFVNILKQL

SEQ ID NO: 48758 - protein, 10 aa, Artificial Sequence
  Description of Artificial Sequence: Synthetic epitope
STGATRSNRA

SEQ ID NO: 48759 - protein, 10 aa, Artificial Sequence
  Description of Artificial Sequence: Synthetic epitope
STGDRLVASA

SEQ ID NO: 48760 - protein, 10 aa, Artificial Sequence
  Description of Artificial Sequence: Synthetic epitope
STGESGNANY

SEQ ID NO: 48761 - protein, 10 aa, Artificial Sequence
  Description of Artificial Sequence: Synthetic epitope
STGETQTQSS

SEQ ID NO: 48762 - protein, 10 aa, Artificial Sequence
  Description of Artificial Sequence: Synthetic epitope
STGIKFYSIQ

SEQ ID NO: 48763 - protein, 10 aa, Artificial Sequence
  Description of Artificial Sequence: Synthetic epitope
STGKTFQRTI

SEQ ID NO: 48764 - protein, 10 aa, Artificial Sequence
  Description of Artificial Sequence: Synthetic epitope
STGLELETPS

SEQ ID NO: 48765 - protein, 10 aa, Artificial Sequence
  Description of Artificial Sequence: Synthetic epitope
STGLTEADEA

SEQ ID NO: 48766 - protein, 10 aa, Artificial Sequence
  Description of Artificial Sequence: Synthetic epitope
STGNKMKFEN

SEQ ID NO: 48767 - protein, 10 aa, Artificial Sequence
  Description of Artificial Sequence: Synthetic epitope
STGQNMSQIS

SEQ ID NO: 48768 - protein, 10 aa, Artificial Sequence
  Description of Artificial Sequence: Synthetic epitope
STGRVSLSAI

SEQ ID NO: 48769 - protein, 10 aa, Artificial Sequence
  Description of Artificial Sequence: Synthetic epitope
STGSQKLVKI

SEQ ID NO: 48770 - protein, 10 aa, Artificial Sequence
  Description of Artificial Sequence: Synthetic epitope
STGTLSNTAD

SEQ ID NO: 48771 - protein, 10 aa, Artificial Sequence
  Description of Artificial Sequence: Synthetic epitope
STGTLSTTNE

SEQ ID NO: 48772 - protein, 10 aa, Artificial Sequence
  Description of Artificial Sequence: Synthetic epitope
STGTRESKPD

SEQ ID NO: 48773 - protein, 10 aa, Artificial Sequence
  Description of Artificial Sequence: Synthetic epitope
STGVTKLKKT

SEQ ID NO: 48774 - protein, 10 aa, Artificial Sequence
  Description of Artificial Sequence: Synthetic epitope
STHAQLLRGK

SEQ ID NO: 48775 - protein, 10 aa, Artificial Sequence
  Description of Artificial Sequence: Synthetic epitope
STHATNNKEQ

SEQ ID NO: 48776 - protein, 10 aa, Artificial Sequence
  Description of Artificial Sequence: Synthetic epitope
STHDMKIGSE

SEQ ID NO: 48777 - protein, 10 aa, Artificial Sequence
  Description of Artificial Sequence: Synthetic epitope
STHIATKTFQ

SEQ ID NO: 48778 - protein, 10 aa, Artificial Sequence
  Description of Artificial Sequence: Synthetic epitope
STHKAQTLAA

SEQ ID NO: 48779 - protein, 10 aa, Artificial Sequence
  Description of Artificial Sequence: Synthetic epitope
STHKPIISTL

SEQ ID NO: 48780 - protein, 10 aa, Artificial Sequence
  Description of Artificial Sequence: Synthetic epitope
STHKSAVHAL

SEQ ID NO: 48781 - protein, 10 aa, Artificial Sequence
  Description of Artificial Sequence: Synthetic epitope
STHKVGLTSE

SEQ ID NO: 48782 - protein, 10 aa, Artificial Sequence
  Description of Artificial Sequence: Synthetic epitope
STHQQSASAS

SEQ ID NO: 48783 - protein, 10 aa, Artificial Sequence
  Description of Artificial Sequence: Synthetic epitope
STHRLMTDAR

SEQ ID NO: 48784 - protein, 10 aa, Artificial Sequence
  Description of Artificial Sequence: Synthetic epitope
STHSDEVTDS

SEQ ID NO: 48785 - protein, 10 aa, Artificial Sequence
  Description of Artificial Sequence: Synthetic epitope
STHTQIDQQP

SEQ ID NO: 48786 - protein, 10 aa, Artificial Sequence
  Description of Artificial Sequence: Synthetic epitope
STIAILKRTE

SEQ ID NO: 48787 - protein, 10 aa, Artificial Sequence
  Description of Artificial Sequence: Synthetic epitope
STIAVYTVYS

SEQ ID NO: 48788 - protein, 10 aa, Artificial Sequence
  Description of Artificial Sequence: Synthetic epitope
STIDASVTSN

SEQ ID NO: 48789 - protein, 10 aa, Artificial Sequence
  Description of Artificial Sequence: Synthetic epitope
STIEGKIGKL

SEQ ID NO: 48790 - protein, 10 aa, Artificial Sequence
  Description of Artificial Sequence: Synthetic epitope
STIGKKSVQT

SEQ ID NO: 48791 - protein, 10 aa, Artificial Sequence
  Description of Artificial Sequence: Synthetic epitope
STIHLLKLGS

SEQ ID NO: 48792 - protein, 10 aa, Artificial Sequence
  Description of Artificial Sequence: Synthetic epitope
STIIHEANEE

SEQ ID NO: 48793 - protein, 10 aa, Artificial Sequence
  Description of Artificial Sequence: Synthetic epitope
STIKDNSEIH

SEQ ID NO: 48794 - protein, 10 aa, Artificial Sequence
  Description of Artificial Sequence: Synthetic epitope
STIKSKLEAR

SEQ ID NO: 48795 - protein, 10 aa, Artificial Sequence
  Description of Artificial Sequence: Synthetic epitope
STIMKDSEKH

SEQ ID NO: 48796 - protein, 10 aa, Artificial Sequence
  Description of Artificial Sequence: Synthetic epitope
STIRLLTSLR

SEQ ID NO: 48797 - protein, 10 aa, Artificial Sequence
  Description of Artificial Sequence: Synthetic epitope
STISQVSEME

SEQ ID NO: 48798 - protein, 10 aa, Artificial Sequence
  Description of Artificial Sequence: Synthetic epitope
STISSLTQEN

SEQ ID NO: 48799 - protein, 10 aa, Artificial Sequence
  Description of Artificial Sequence: Synthetic epitope
STISTATTAL

SEQ ID NO: 48800 - protein, 10 aa, Artificial Sequence
  Description of Artificial Sequence: Synthetic epitope
STITLPVAST

SEQ ID NO: 48801 - protein, 10 aa, Artificial Sequence
  Description of Artificial Sequence: Synthetic epitope
STIYKFQGMS

SEQ ID NO: 48802 - protein, 10 aa, Artificial Sequence
  Description of Artificial Sequence: Synthetic epitope
STIYSLNMEH

SEQ ID NO: 48803 - protein, 10 aa, Artificial Sequence
  Description of Artificial Sequence: Synthetic epitope
STKAIDIQNA

SEQ ID NO: 48804 - protein, 10 aa, Artificial Sequence
  Description of Artificial Sequence: Synthetic epitope
STKAKTTEQG

SEQ ID NO: 48805 - protein, 10 aa, Artificial Sequence
  Description of Artificial Sequence: Synthetic epitope
STKAVGSPKA

SEQ ID NO: 48806 - protein, 10 aa, Artificial Sequence
  Description of Artificial Sequence: Synthetic epitope
STKAVIMGET

SEQ ID NO: 48807 - protein, 10 aa, Artificial Sequence
  Description of Artificial Sequence: Synthetic epitope
STKEADYSKH

SEQ ID NO: 48808 - protein, 10 aa, Artificial Sequence
  Description of Artificial Sequence: Synthetic epitope
STKEAEDAPE

SEQ ID NO: 48809 - protein, 10 aa, Artificial Sequence
  Description of Artificial Sequence: Synthetic epitope
STKETERKET

SEQ ID NO: 48810 - protein, 10 aa, Artificial Sequence
  Description of Artificial Sequence: Synthetic epitope
STKFDLLISS

SEQ ID NO: 48811 - protein, 10 aa, Artificial Sequence
  Description of Artificial Sequence: Synthetic epitope
STKGAKTDAQ

SEQ ID NO: 48812 - protein, 10 aa, Artificial Sequence
  Description of Artificial Sequence: Synthetic epitope
STKGERFKDV

SEQ ID NO: 48813 - protein, 10 aa, Artificial Sequence
  Description of Artificial Sequence: Synthetic epitope
STKGKKRSQP

SEQ ID NO: 48814 - protein, 10 aa, Artificial Sequence
  Description of Artificial Sequence: Synthetic epitope
STKKAEGKLS

SEQ ID NO: 48815 - protein, 10 aa, Artificial Sequence
  Description of Artificial Sequence: Synthetic epitope
STKKAQTNDS

SEQ ID NO: 48816 - protein, 10 aa, Artificial Sequence
  Description of Artificial Sequence: Synthetic epitope
STKKARNPEV

SEQ ID NO: 48817 - protein, 10 aa, Artificial Sequence
  Description of Artificial Sequence: Synthetic epitope
STKKARNPEV

SEQ ID NO: 48818 - protein, 10 aa, Artificial Sequence
  Description of Artificial Sequence: Synthetic epitope
STKKATEGKT

SEQ ID NO: 48819 - protein, 10 aa, Artificial Sequence
  Description of Artificial Sequence: Synthetic epitope
STKLLMEKEW

SEQ ID NO: 48820 - protein, 10 aa, Artificial Sequence
  Description of Artificial Sequence: Synthetic epitope
STKLQALPSY

SEQ ID NO: 48821 - protein, 10 aa, Artificial Sequence
  Description of Artificial Sequence: Synthetic epitope
STKNKAGKAS

SEQ ID NO: 48822 - protein, 10 aa, Artificial Sequence
  Description of Artificial Sequence: Synthetic epitope
STKPPNAAKP

SEQ ID NO: 48823 - protein, 10 aa, Artificial Sequence
  Description of Artificial Sequence: Synthetic epitope
STKQGNSQES

SEQ ID NO: 48824 - protein, 10 aa, Artificial Sequence
  Description of Artificial Sequence: Synthetic epitope
STKQKLIVHQ

SEQ ID NO: 48825 - protein, 10 aa, Artificial Sequence
  Description of Artificial Sequence: Synthetic epitope
STKQYVEVLS

SEQ ID NO: 48826 - protein, 10 aa, Artificial Sequence
  Description of Artificial Sequence: Synthetic epitope
STKTDASSTH

SEQ ID NO: 48827 - protein, 10 aa, Artificial Sequence
  Description of Artificial Sequence: Synthetic epitope
STKTEAFYDS

SEQ ID NO: 48828 - protein, 10 aa, Artificial Sequence
  Description of Artificial Sequence: Synthetic epitope
STLAAFTVRQ

SEQ ID NO: 48829 - protein, 10 aa, Artificial Sequence
  Description of Artificial Sequence: Synthetic epitope
STLADEKSEK

SEQ ID NO: 48830 - protein, 10 aa, Artificial Sequence
  Description of Artificial Sequence: Synthetic epitope
STLAQNSQVF

SEQ ID NO: 48831 - protein, 10 aa, Artificial Sequence
  Description of Artificial Sequence: Synthetic epitope
STLASSFKRR

SEQ ID NO: 48832 - protein, 10 aa, Artificial Sequence
  Description of Artificial Sequence: Synthetic epitope
STLDAALSGT

SEQ ID NO: 48833 - protein, 10 aa, Artificial Sequence
  Description of Artificial Sequence: Synthetic epitope
STLEAEKVYQ

SEQ ID NO: 48834 - protein, 10 aa, Artificial Sequence
  Description of Artificial Sequence: Synthetic epitope
STLELSLKSE

SEQ ID NO: 48835 - protein, 10 aa, Artificial Sequence
  Description of Artificial Sequence: Synthetic epitope
STLENATSIS

SEQ ID NO: 48836 - protein, 10 aa, Artificial Sequence
  Description of Artificial Sequence: Synthetic epitope
STLEQTREET

SEQ ID NO: 48837 - protein, 10 aa, Artificial Sequence
  Description of Artificial Sequence: Synthetic epitope
STLGLKSQNG

SEQ ID NO: 48838 - protein, 10 aa, Artificial Sequence
  Description of Artificial Sequence: Synthetic epitope
STLGTLNKSS

SEQ ID NO: 48839 - protein, 10 aa, Artificial Sequence
  Description of Artificial Sequence: Synthetic epitope
STLHESQLSV

SEQ ID NO: 48840 - protein, 10 aa, Artificial Sequence
  Description of Artificial Sequence: Synthetic epitope
STLHKSVVKM

SEQ ID NO: 48841 - protein, 10 aa, Artificial Sequence
  Description of Artificial Sequence: Synthetic epitope
STLILSSTSA

SEQ ID NO: 48842 - protein, 10 aa, Artificial Sequence
  Description of Artificial Sequence: Synthetic epitope
STLIQASDSS

SEQ ID NO: 48843 - protein, 10 aa, Artificial Sequence
  Description of Artificial Sequence: Synthetic epitope
STLIRSLQSQ

SEQ ID NO: 48844 - protein, 10 aa, Artificial Sequence
  Description of Artificial Sequence: Synthetic epitope
STLKEKGYKA

SEQ ID NO: 48845 - protein, 10 aa, Artificial Sequence
  Description of Artificial Sequence: Synthetic epitope
STLKGKTNGA

SEQ ID NO: 48846 - protein, 10 aa, Artificial Sequence
  Description of Artificial Sequence: Synthetic epitope
STLKKALGLQ

SEQ ID NO: 48847 - protein, 10 aa, Artificial Sequence
  Description of Artificial Sequence: Synthetic epitope
STLKKTLESD

SEQ ID NO: 48848 - protein, 10 aa, Artificial Sequence
  Description of Artificial Sequence: Synthetic epitope
STLKLREKLS

SEQ ID NO: 48849 - protein, 10 aa, Artificial Sequence
  Description of Artificial Sequence: Synthetic epitope
STLKLSEGQR

SEQ ID NO: 48850 - protein, 10 aa, Artificial Sequence
  Description of Artificial Sequence: Synthetic epitope
STLKTKVVHN

SEQ ID NO: 48851 - protein, 10 aa, Artificial Sequence
  Description of Artificial Sequence: Synthetic epitope
STLLTETKKS

SEQ ID NO: 48852 - protein, 10 aa, Artificial Sequence
  Description of Artificial Sequence: Synthetic epitope
STLLTTVLIS

SEQ ID NO: 48853 - protein, 10 aa, Artificial Sequence
  Description of Artificial Sequence: Synthetic epitope
STLLYSIEER

SEQ ID NO: 48854 - protein, 10 aa, Artificial Sequence
  Description of Artificial Sequence: Synthetic epitope
STLMTQKTGI

SEQ ID NO: 48855 - protein, 10 aa, Artificial Sequence
  Description of Artificial Sequence: Synthetic epitope
STLNIELVNS

SEQ ID NO: 48856 - protein, 10 aa, Artificial Sequence
  Description of Artificial Sequence: Synthetic epitope
STLNNSQQNK

SEQ ID NO: 48857 - protein, 10 aa, Artificial Sequence
  Description of Artificial Sequence: Synthetic epitope
STLPATSTRQ

SEQ ID NO: 48858 - protein, 10 aa, Artificial Sequence
  Description of Artificial Sequence: Synthetic epitope
STLPESLLSS

SEQ ID NO: 48859 - protein, 10 aa, Artificial Sequence
  Description of Artificial Sequence: Synthetic epitope
STLPTRSALP

SEQ ID NO: 48860 - protein, 10 aa, Artificial Sequence
  Description of Artificial Sequence: Synthetic epitope
STLQSLLGLP

SEQ ID NO: 48861 - protein, 10 aa, Artificial Sequence
  Description of Artificial Sequence: Synthetic epitope
STLQTDTLLH

SEQ ID NO: 48862 - protein, 10 aa, Artificial Sequence
  Description of Artificial Sequence: Synthetic epitope
STLQVTSRFQ

SEQ ID NO: 48863 - protein, 10 aa, Artificial Sequence
  Description of Artificial Sequence: Synthetic epitope
STLRNIKMHI

SEQ ID NO: 48864 - protein, 10 aa, Artificial Sequence
  Description of Artificial Sequence: Synthetic epitope
STLRQLSTST

SEQ ID NO: 48865 - protein, 10 aa, Artificial Sequence
  Description of Artificial Sequence: Synthetic epitope
STLSDSLSEN

SEQ ID NO: 48866 - protein, 10 aa, Artificial Sequence
  Description of Artificial Sequence: Synthetic epitope
STLSLISIMK

SEQ ID NO: 48867 - protein, 10 aa, Artificial Sequence
  Description of Artificial Sequence: Synthetic epitope
STLSRSLSLQ

SEQ ID NO: 48868 - protein, 10 aa, Artificial Sequence
  Description of Artificial Sequence: Synthetic epitope
STLSSRFTHA

SEQ ID NO: 48869 - protein, 10 aa, Artificial Sequence
  Description of Artificial Sequence: Synthetic epitope
STLTEILEAM

SEQ ID NO: 48870 - protein, 10 aa, Artificial Sequence
  Description of Artificial Sequence: Synthetic epitope
STLTEMESQK

SEQ ID NO: 48871 - protein, 10 aa, Artificial Sequence
  Description of Artificial Sequence: Synthetic epitope
STLTSTGSSE

SEQ ID NO: 48872 - protein, 10 aa, Artificial Sequence
  Description of Artificial Sequence: Synthetic epitope
STLVTLFKLL

SEQ ID NO: 48873 - protein, 10 aa, Artificial Sequence
  Description of Artificial Sequence: Synthetic epitope
STLYQNINLV

SEQ ID NO: 48874 - protein, 10 aa, Artificial Sequence
  Description of Artificial Sequence: Synthetic epitope
STMAAKKNRQ

SEQ ID NO: 48875 - protein, 10 aa, Artificial Sequence
  Description of Artificial Sequence: Synthetic epitope
STMASASEGE

SEQ ID NO: 48876 - protein, 10 aa, Artificial Sequence
  Description of Artificial Sequence: Synthetic epitope
STMASSYRDR

SEQ ID NO: 48877 - protein, 10 aa, Artificial Sequence
  Description of Artificial Sequence: Synthetic epitope
STMESDKMLY

SEQ ID NO: 48878 - protein, 10 aa, Artificial Sequence
  Description of Artificial Sequence: Synthetic epitope
STMKNPASLL

SEQ ID NO: 48879 - protein, 10 aa, Artificial Sequence
  Description of Artificial Sequence: Synthetic epitope
STMMSVHRGE

SEQ ID NO: 48880 - protein, 10 aa, Artificial Sequence
  Description of Artificial Sequence: Synthetic epitope
STMSIGQARK

SEQ ID NO: 48881 - protein, 10 aa, Artificial Sequence
  Description of Artificial Sequence: Synthetic epitope
STNDFQANSG

SEQ ID NO: 48882 - protein, 10 aa, Artificial Sequence
  Description of Artificial Sequence: Synthetic epitope
STNEGQETNQ

SEQ ID NO: 48883 - protein, 10 aa, Artificial Sequence
  Description of Artificial Sequence: Synthetic epitope
STNELTTDST

SEQ ID NO: 48884 - protein, 10 aa, Artificial Sequence
  Description of Artificial Sequence: Synthetic epitope
STNEQAIAVE

SEQ ID NO: 48885 - protein, 10 aa, Artificial Sequence
  Description of Artificial Sequence: Synthetic epitope
STNKNKNNAS

SEQ ID NO: 48886 - protein, 10 aa, Artificial Sequence
  Description of Artificial Sequence: Synthetic epitope
STNLKADPEE

SEQ ID NO: 48887 - protein, 10 aa, Artificial Sequence
  Description of Artificial Sequence: Synthetic epitope
STNLKDILAD

SEQ ID NO: 48888 - protein, 10 aa, Artificial Sequence
  Description of Artificial Sequence: Synthetic epitope
STNLQLARLV

SEQ ID NO: 48889 - protein, 10 aa, Artificial Sequence
  Description of Artificial Sequence: Synthetic epitope
STNLSNKQVI

SEQ ID NO: 48890 - protein, 10 aa, Artificial Sequence
  Description of Artificial Sequence: Synthetic epitope
STNNKKEEYG

SEQ ID NO: 48891 - protein, 10 aa, Artificial Sequence
  Description of Artificial Sequence: Synthetic epitope
STNSETNRGE

SEQ ID NO: 48892 - protein, 10 aa, Artificial Sequence
  Description of Artificial Sequence: Synthetic epitope
STNSFNEQEA

SEQ ID NO: 48893 - protein, 10 aa, Artificial Sequence
  Description of Artificial Sequence: Synthetic epitope
STNSIMTLLS

SEQ ID NO: 48894 - protein, 10 aa, Artificial Sequence
  Description of Artificial Sequence: Synthetic epitope
STNSVLSTST

SEQ ID NO: 48895 - protein, 10 aa, Artificial Sequence
  Description of Artificial Sequence: Synthetic epitope
STNTEVSSEI

SEQ ID NO: 48896 - protein, 10 aa, Artificial Sequence
  Description of Artificial Sequence: Synthetic epitope
STNTVTPTAS

SEQ ID NO: 48897 - protein, 10 aa, Artificial Sequence
  Description of Artificial Sequence: Synthetic epitope
STNVEKADKQ

SEQ ID NO: 48898 - protein, 10 aa, Artificial Sequence
  Description of Artificial Sequence: Synthetic epitope
STPEPKIKKN

SEQ ID NO: 48899 - protein, 10 aa, Artificial Sequence
  Description of Artificial Sequence: Synthetic epitope
STPFFQEITD

SEQ ID NO: 48900 - protein, 10 aa, Artificial Sequence
  Description of Artificial Sequence: Synthetic epitope
STPFQVEKDQ

SEQ ID NO: 48901 - protein, 10 aa, Artificial Sequence
  Description of Artificial Sequence: Synthetic epitope
STPHGAKSII

SEQ ID NO: 48902 - protein, 10 aa, Artificial Sequence
  Description of Artificial Sequence: Synthetic epitope
STPKTPSRDA

SEQ ID NO: 48903 - protein, 10 aa, Artificial Sequence
  Description of Artificial Sequence: Synthetic epitope
STPKTTVSSK

SEQ ID NO: 48904 - protein, 10 aa, Artificial Sequence
  Description of Artificial Sequence: Synthetic epitope
STPMIDSFVR

SEQ ID NO: 48905 - protein, 10 aa, Artificial Sequence
  Description of Artificial Sequence: Synthetic epitope
STPNAKTVNG

SEQ ID NO: 48906 - protein, 10 aa, Artificial Sequence
  Description of Artificial Sequence: Synthetic epitope
STPNEVVKHS

SEQ ID NO: 48907 - protein, 10 aa, Artificial Sequence
  Description of Artificial Sequence: Synthetic epitope
STPNVVSQQA

SEQ ID NO: 48908 - protein, 10 aa, Artificial Sequence
  Description of Artificial Sequence: Synthetic epitope
STPQSAKSPT

SEQ ID NO: 48909 - protein, 10 aa, Artificial Sequence
  Description of Artificial Sequence: Synthetic epitope
STPQVTANEE

SEQ ID NO: 48910 - protein, 10 aa, Artificial Sequence
  Description of Artificial Sequence: Synthetic epitope
STPRASAATT

SEQ ID NO: 48911 - protein, 10 aa, Artificial Sequence
  Description of Artificial Sequence: Synthetic epitope
STPSSKSKEL

SEQ ID NO: 48912 - protein, 10 aa, Artificial Sequence
  Description of Artificial Sequence: Synthetic epitope
STPTSTMESS

SEQ ID NO: 48913 - protein, 10 aa, Artificial Sequence
  Description of Artificial Sequence: Synthetic epitope
STPVARELKA

SEQ ID NO: 48914 - protein, 10 aa, Artificial Sequence
  Description of Artificial Sequence: Synthetic epitope
STPVIVSATT

SEQ ID NO: 48915 - protein, 10 aa, Artificial Sequence
  Description of Artificial Sequence: Synthetic epitope
STPVKAVPQK

SEQ ID NO: 48916 - protein, 10 aa, Artificial Sequence
  Description of Artificial Sequence: Synthetic epitope
STQANLEIDS

SEQ ID NO: 48917 - protein, 10 aa, Artificial Sequence
  Description of Artificial Sequence: Synthetic epitope
STQASTRKEI

SEQ ID NO: 48918 - protein, 10 aa, Artificial Sequence
  Description of Artificial Sequence: Synthetic epitope
STQEADSRLL

SEQ ID NO: 48919 - protein, 10 aa, Artificial Sequence
  Description of Artificial Sequence: Synthetic epitope
STQEKMKRLS

SEQ ID NO: 48920 - protein, 10 aa, Artificial Sequence
  Description of Artificial Sequence: Synthetic epitope
STQMESTRVS

SEQ ID NO: 48921 - protein, 10 aa, Artificial Sequence
  Description of Artificial Sequence: Synthetic epitope
STQMLNQQFQ

SEQ ID NO: 48922 - protein, 10 aa, Artificial Sequence
  Description of Artificial Sequence: Synthetic epitope
STQQEKETIA

SEQ ID NO: 48923 - protein, 10 aa, Artificial Sequence
  Description of Artificial Sequence: Synthetic epitope
STQQETSRAS

SEQ ID NO: 48924 - protein, 10 aa, Artificial Sequence
  Description of Artificial Sequence: Synthetic epitope
STQRSVSDVA

SEQ ID NO: 48925 - protein, 10 aa, Artificial Sequence
  Description of Artificial Sequence: Synthetic epitope
STQSKSNKTS

SEQ ID NO: 48926 - protein, 10 aa, Artificial Sequence
  Description of Artificial Sequence: Synthetic epitope
STQSPTTVSS

SEQ ID NO: 48927 - protein, 10 aa, Artificial Sequence
  Description of Artificial Sequence: Synthetic epitope
STQSQALGSL

SEQ ID NO: 48928 - protein, 10 aa, Artificial Sequence
  Description of Artificial Sequence: Synthetic epitope
STQTDKSAEL

SEQ ID NO: 48929 - protein, 10 aa, Artificial Sequence
  Description of Artificial Sequence: Synthetic epitope
STRDKNRRGE

SEQ ID NO: 48930 - protein, 10 aa, Artificial Sequence
  Description of Artificial Sequence: Synthetic epitope
STRDRRSPAE

SEQ ID NO: 48931 - protein, 10 aa, Artificial Sequence
  Description of Artificial Sequence: Synthetic epitope
STRELESDYY

SEQ ID NO: 48932 - protein, 10 aa, Artificial Sequence
  Description of Artificial Sequence: Synthetic epitope
STRGATNKKA

SEQ ID NO: 48933 - protein, 10 aa, Artificial Sequence
  Description of Artificial Sequence: Synthetic epitope
STRKALSVLK

SEQ ID NO: 48934 - protein, 10 aa, Artificial Sequence
  Description of Artificial Sequence: Synthetic epitope
STRKEELIAI

SEQ ID NO: 48935 - protein, 10 aa, Artificial Sequence
  Description of Artificial Sequence: Synthetic epitope
STRKNSKNDS

SEQ ID NO: 48936 - protein, 10 aa, Artificial Sequence
  Description of Artificial Sequence: Synthetic epitope
STRNSIATLQ

SEQ ID NO: 48937 - protein, 10 aa, Artificial Sequence
  Description of Artificial Sequence: Synthetic epitope
STRPEVASIE

SEQ ID NO: 48938 - protein, 10 aa, Artificial Sequence
  Description of Artificial Sequence: Synthetic epitope
STRRQETSRE

SEQ ID NO: 48939 - protein, 10 aa, Artificial Sequence
  Description of Artificial Sequence: Synthetic epitope
STRRTGSQKE

SEQ ID NO: 48940 - protein, 10 aa, Artificial Sequence
  Description of Artificial Sequence: Synthetic epitope
STRSLNERAE

SEQ ID NO: 48941 - protein, 10 aa, Artificial Sequence
  Description of Artificial Sequence: Synthetic epitope
STRSLTSYSL

SEQ ID NO: 48942 - protein, 10 aa, Artificial Sequence
  Description of Artificial Sequence: Synthetic epitope
STRTAATSVP

SEQ ID NO: 48943 - protein, 10 aa, Artificial Sequence
  Description of Artificial Sequence: Synthetic epitope
STSAAPAEIA

SEQ ID NO: 48944 - protein, 10 aa, Artificial Sequence
  Description of Artificial Sequence: Synthetic epitope
STSAFSKAGM

SEQ ID NO: 48945 - protein, 10 aa, Artificial Sequence
  Description of Artificial Sequence: Synthetic epitope
STSASAIMNG

SEQ ID NO: 48946 - protein, 10 aa, Artificial Sequence
  Description of Artificial Sequence: Synthetic epitope
STSASEAYGK

SEQ ID NO: 48947 - protein, 10 aa, Artificial Sequence
  Description of Artificial Sequence: Synthetic epitope
STSASRSLGT

SEQ ID NO: 48948 - protein, 10 aa, Artificial Sequence
  Description of Artificial Sequence: Synthetic epitope
STSAVASRSQ

SEQ ID NO: 48949 - protein, 10 aa, Artificial Sequence
  Description of Artificial Sequence: Synthetic epitope
STSDIDVVAL

SEQ ID NO: 48950 - protein, 10 aa, Artificial Sequence
  Description of Artificial Sequence: Synthetic epitope
STSDQSQQLA

SEQ ID NO: 48951 - protein, 10 aa, Artificial Sequence
  Description of Artificial Sequence: Synthetic epitope
STSEASVLGE

SEQ ID NO: 48952 - protein, 10 aa, Artificial Sequence
  Description of Artificial Sequence: Synthetic epitope
STSEATTDED

SEQ ID NO: 48953 - protein, 10 aa, Artificial Sequence
  Description of Artificial Sequence: Synthetic epitope
STSEDEFGSN

SEQ ID NO: 48954 - protein, 10 aa, Artificial Sequence
  Description of Artificial Sequence: Synthetic epitope
STSEESSFVF

SEQ ID NO: 48955 - protein, 10 aa, Artificial Sequence
  Description of Artificial Sequence: Synthetic epitope
STSERTLLKG

SEQ ID NO: 48956 - protein, 10 aa, Artificial Sequence
  Description of Artificial Sequence: Synthetic epitope
STSETETGEA

SEQ ID NO: 48957 - protein, 10 aa, Artificial Sequence
  Description of Artificial Sequence: Synthetic epitope
STSETSLGEE

SEQ ID NO: 48958 - protein, 10 aa, Artificial Sequence
  Description of Artificial Sequence: Synthetic epitope
STSEVTSQQE

SEQ ID NO: 48959 - protein, 10 aa, Artificial Sequence
  Description of Artificial Sequence: Synthetic epitope
STSGQKEERK

SEQ ID NO: 48960 - protein, 10 aa, Artificial Sequence
  Description of Artificial Sequence: Synthetic epitope
STSGQKEERK

SEQ ID NO: 48961 - protein, 10 aa, Artificial Sequence
  Description of Artificial Sequence: Synthetic epitope
STSIITSTQK

SEQ ID NO: 48962 - protein, 10 aa, Artificial Sequence
  Description of Artificial Sequence: Synthetic epitope
STSIPSSEAT

SEQ ID NO: 48963 - protein, 10 aa, Artificial Sequence
  Description of Artificial Sequence: Synthetic epitope
STSKATISDE

SEQ ID NO: 48964 - protein, 10 aa, Artificial Sequence
  Description of Artificial Sequence: Synthetic epitope
STSKAVETVH

SEQ ID NO: 48965 - protein, 10 aa, Artificial Sequence
  Description of Artificial Sequence: Synthetic epitope
STSKEIKKSK

SEQ ID NO: 48966 - protein, 10 aa, Artificial Sequence
  Description of Artificial Sequence: Synthetic epitope
STSLAAGTEV

SEQ ID NO: 48967 - protein, 10 aa, Artificial Sequence
  Description of Artificial Sequence: Synthetic epitope
STSLAETYNR

SEQ ID NO: 48968 - protein, 10 aa, Artificial Sequence
  Description of Artificial Sequence: Synthetic epitope
STSLAQSEAE

SEQ ID NO: 48969 - protein, 10 aa, Artificial Sequence
  Description of Artificial Sequence: Synthetic epitope
STSLELATLS

SEQ ID NO: 48970 - protein, 10 aa, Artificial Sequence
  Description of Artificial Sequence: Synthetic epitope
STSLKRDFKI

SEQ ID NO: 48971 - protein, 10 aa, Artificial Sequence
  Description of Artificial Sequence: Synthetic epitope
STSLLSLSAT

SEQ ID NO: 48972 - protein, 10 aa, Artificial Sequence
  Description of Artificial Sequence: Synthetic epitope
STSMKNMEKE

SEQ ID NO: 48973 - protein, 10 aa, Artificial Sequence
  Description of Artificial Sequence: Synthetic epitope
STSMRKSSND

SEQ ID NO: 48974 - protein, 10 aa, Artificial Sequence
  Description of Artificial Sequence: Synthetic epitope
STSMSPSAAL

SEQ ID NO: 48975 - protein, 10 aa, Artificial Sequence
  Description of Artificial Sequence: Synthetic epitope
STSNEVIEME

SEQ ID NO: 48976 - protein, 10 aa, Artificial Sequence
  Description of Artificial Sequence: Synthetic epitope
STSNEVIEME

SEQ ID NO: 48977 - protein, 10 aa, Artificial Sequence
  Description of Artificial Sequence: Synthetic epitope
STSNFSETSA

SEQ ID NO: 48978 - protein, 10 aa, Artificial Sequence
  Description of Artificial Sequence: Synthetic epitope
STSNRKSPFT

SEQ ID NO: 48979 - protein, 10 aa, Artificial Sequence
  Description of Artificial Sequence: Synthetic epitope
STSNTTFVKT

SEQ ID NO: 48980 - protein, 10 aa, Artificial Sequence
  Description of Artificial Sequence: Synthetic epitope
STSNTVTAAH

SEQ ID NO: 48981 - protein, 10 aa, Artificial Sequence
  Description of Artificial Sequence: Synthetic epitope
STSPETKHSE

SEQ ID NO: 48982 - protein, 10 aa, Artificial Sequence
  Description of Artificial Sequence: Synthetic epitope
STSPKFSTGT

SEQ ID NO: 48983 - protein, 10 aa, Artificial Sequence
  Description of Artificial Sequence: Synthetic epitope
STSPTISKTQ

SEQ ID NO: 48984 - protein, 10 aa, Artificial Sequence
  Description of Artificial Sequence: Synthetic epitope
STSQALKNIR

SEQ ID NO: 48985 - protein, 10 aa, Artificial Sequence
  Description of Artificial Sequence: Synthetic epitope
STSQAVFRLQ

SEQ ID NO: 48986 - protein, 10 aa, Artificial Sequence
  Description of Artificial Sequence: Synthetic epitope
STSQMLSPAQ

SEQ ID NO: 48987 - protein, 10 aa, Artificial Sequence
  Description of Artificial Sequence: Synthetic epitope
STSQTATALT

SEQ ID NO: 48988 - protein, 10 aa, Artificial Sequence
  Description of Artificial Sequence: Synthetic epitope
STSQYRSAKP

SEQ ID NO: 48989 - protein, 10 aa, Artificial Sequence
  Description of Artificial Sequence: Synthetic epitope
STSRKDKSSM

SEQ ID NO: 48990 - protein, 10 aa, Artificial Sequence
  Description of Artificial Sequence: Synthetic epitope
STSSAAEQNS

SEQ ID NO: 48991 - protein, 10 aa, Artificial Sequence
  Description of Artificial Sequence: Synthetic epitope
STSSAGADVD

SEQ ID NO: 48992 - protein, 10 aa, Artificial Sequence
  Description of Artificial Sequence: Synthetic epitope
STSSAQGQQT

SEQ ID NO: 48993 - protein, 10 aa, Artificial Sequence
  Description of Artificial Sequence: Synthetic epitope
STSSEDKQDL

SEQ ID NO: 48994 - protein, 10 aa, Artificial Sequence
  Description of Artificial Sequence: Synthetic epitope
STSSETETAS

SEQ ID NO: 48995 - protein, 10 aa, Artificial Sequence
  Description of Artificial Sequence: Synthetic epitope
STSSFPSTTA

SEQ ID NO: 48996 - protein, 10 aa, Artificial Sequence
  Description of Artificial Sequence: Synthetic epitope
STSSHKSFPK

SEQ ID NO: 48997 - protein, 10 aa, Artificial Sequence
  Description of Artificial Sequence: Synthetic epitope
STSSKAEPPQ

SEQ ID NO: 48998 - protein, 10 aa, Artificial Sequence
  Description of Artificial Sequence: Synthetic epitope
STSSKKARPV

SEQ ID NO: 48999 - protein, 10 aa, Artificial Sequence
  Description of Artificial Sequence: Synthetic epitope
STSSQAAGSY

SEQ ID NO: 49000 - protein, 10 aa, Artificial Sequence
  Description of Artificial Sequence: Synthetic epitope
STSSRSQDRE

SEQ ID NO: 49001 - protein, 10 aa, Artificial Sequence
  Description of Artificial Sequence: Synthetic epitope
STSSTELSQR

SEQ ID NO: 49002 - protein, 10 aa, Artificial Sequence
  Description of Artificial Sequence: Synthetic epitope
STSSTQLPIG

SEQ ID NO: 49003 - protein, 10 aa, Artificial Sequence
  Description of Artificial Sequence: Synthetic epitope
STSSTSDAFW

SEQ ID NO: 49004 - protein, 10 aa, Artificial Sequence
  Description of Artificial Sequence: Synthetic epitope
STSTEGLKIP

SEQ ID NO: 49005 - protein, 10 aa, Artificial Sequence
  Description of Artificial Sequence: Synthetic epitope
STSTFKATGN

SEQ ID NO: 49006 - protein, 10 aa, Artificial Sequence
  Description of Artificial Sequence: Synthetic epitope
STSTSIKVKK

SEQ ID NO: 49007 - protein, 10 aa, Artificial Sequence
  Description of Artificial Sequence: Synthetic epitope
STSTSSTTGG

SEQ ID NO: 49008 - protein, 10 aa, Artificial Sequence
  Description of Artificial Sequence: Synthetic epitope
STSVATANST

SEQ ID NO: 49009 - protein, 10 aa, Artificial Sequence
  Description of Artificial Sequence: Synthetic epitope
STSVEQVRER

SEQ ID NO: 49010 - protein, 10 aa, Artificial Sequence
  Description of Artificial Sequence: Synthetic epitope
STSVIKLSKD

SEQ ID NO: 49011 - protein, 10 aa, Artificial Sequence
  Description of Artificial Sequence: Synthetic epitope
STSVNSLVQG

SEQ ID NO: 49012 - protein, 10 aa, Artificial Sequence
  Description of Artificial Sequence: Synthetic epitope
STSVQQYHQQ

SEQ ID NO: 49013 - protein, 10 aa, Artificial Sequence
  Description of Artificial Sequence: Synthetic epitope
STSWRFMEKL

SEQ ID NO: 49014 - protein, 10 aa, Artificial Sequence
  Description of Artificial Sequence: Synthetic epitope
STTAESHSLS

SEQ ID NO: 49015 - protein, 10 aa, Artificial Sequence
  Description of Artificial Sequence: Synthetic epitope
STTDEPSAEQ

SEQ ID NO: 49016 - protein, 10 aa, Artificial Sequence
  Description of Artificial Sequence: Synthetic epitope
STTEGIQLAK

SEQ ID NO: 49017 - protein, 10 aa, Artificial Sequence
  Description of Artificial Sequence: Synthetic epitope
STTELIEEIS

SEQ ID NO: 49018 - protein, 10 aa, Artificial Sequence
  Description of Artificial Sequence: Synthetic epitope
STTESIEIKA

SEQ ID NO: 49019 - protein, 10 aa, Artificial Sequence
  Description of Artificial Sequence: Synthetic epitope
STTGYDMARN

SEQ ID NO: 49020 - protein, 10 aa, Artificial Sequence
  Description of Artificial Sequence: Synthetic epitope
STTKARVAPE

SEQ ID NO: 49021 - protein, 10 aa, Artificial Sequence
  Description of Artificial Sequence: Synthetic epitope
STTKTEASQE

SEQ ID NO: 49022 - protein, 10 aa, Artificial Sequence
  Description of Artificial Sequence: Synthetic epitope
STTKTEVIPP

SEQ ID NO: 49023 - protein, 10 aa, Artificial Sequence
  Description of Artificial Sequence: Synthetic epitope
STTLKKSNMG

SEQ ID NO: 49024 - protein, 10 aa, Artificial Sequence
  Description of Artificial Sequence: Synthetic epitope
STTLNMQTSQ

SEQ ID NO: 49025 - protein, 10 aa, Artificial Sequence
  Description of Artificial Sequence: Synthetic epitope
STTPASTTPA

SEQ ID NO: 49026 - protein, 10 aa, Artificial Sequence
  Description of Artificial Sequence: Synthetic epitope
STTPKMDEKI

SEQ ID NO: 49027 - protein, 10 aa, Artificial Sequence
  Description of Artificial Sequence: Synthetic epitope
STTPLTTDDG

SEQ ID NO: 49028 - protein, 10 aa, Artificial Sequence
  Description of Artificial Sequence: Synthetic epitope
STTPNRKDSS

SEQ ID NO: 49029 - protein, 10 aa, Artificial Sequence
  Description of Artificial Sequence: Synthetic epitope
STTQNPQKET

SEQ ID NO: 49030 - protein, 10 aa, Artificial Sequence
  Description of Artificial Sequence: Synthetic epitope
STTQTSRMVG

SEQ ID NO: 49031 - protein, 10 aa, Artificial Sequence
  Description of Artificial Sequence: Synthetic epitope
STTRDRNKKA

SEQ ID NO: 49032 - protein, 10 aa, Artificial Sequence
  Description of Artificial Sequence: Synthetic epitope
STTRSIERAT

SEQ ID NO: 49033 - protein, 10 aa, Artificial Sequence
  Description of Artificial Sequence: Synthetic epitope
STTRVTSSEG

SEQ ID NO: 49034 - protein, 10 aa, Artificial Sequence
  Description of Artificial Sequence: Synthetic epitope
STTSISQARK

SEQ ID NO: 49035 - protein, 10 aa, Artificial Sequence
  Description of Artificial Sequence: Synthetic epitope
STTSLEAEYT

SEQ ID NO: 49036 - protein, 10 aa, Artificial Sequence
  Description of Artificial Sequence: Synthetic epitope
STTSQASPAQ

SEQ ID NO: 49037 - protein, 10 aa, Artificial Sequence
  Description of Artificial Sequence: Synthetic epitope
STTSSASPAQ

SEQ ID NO: 49038 - protein, 10 aa, Artificial Sequence
  Description of Artificial Sequence: Synthetic epitope
STTSSATPQA

SEQ ID NO: 49039 - protein, 10 aa, Artificial Sequence
  Description of Artificial Sequence: Synthetic epitope
STTSSTVSAP

SEQ ID NO: 49040 - protein, 10 aa, Artificial Sequence
  Description of Artificial Sequence: Synthetic epitope
STTSTIEFKN

SEQ ID NO: 49041 - protein, 10 aa, Artificial Sequence
  Description of Artificial Sequence: Synthetic epitope
STTVGVTSGE

SEQ ID NO: 49042 - protein, 10 aa, Artificial Sequence
  Description of Artificial Sequence: Synthetic epitope
STTVKIVLKE

SEQ ID NO: 49043 - protein, 10 aa, Artificial Sequence
  Description of Artificial Sequence: Synthetic epitope
STTVQKFIDH

SEQ ID NO: 49044 - protein, 10 aa, Artificial Sequence
  Description of Artificial Sequence: Synthetic epitope
STVASGTVAR

SEQ ID NO: 49045 - protein, 10 aa, Artificial Sequence
  Description of Artificial Sequence: Synthetic epitope
STVASKSPEA

SEQ ID NO: 49046 - protein, 10 aa, Artificial Sequence
  Description of Artificial Sequence: Synthetic epitope
STVATAASPA

SEQ ID NO: 49047 - protein, 10 aa, Artificial Sequence
  Description of Artificial Sequence: Synthetic epitope
STVDDTLPQS

SEQ ID NO: 49048 - protein, 10 aa, Artificial Sequence
  Description of Artificial Sequence: Synthetic epitope
STVDEKEQKQ

SEQ ID NO: 49049 - protein, 10 aa, Artificial Sequence
  Description of Artificial Sequence: Synthetic epitope
STVINNTRGI

SEQ ID NO: 49050 - protein, 10 aa, Artificial Sequence
  Description of Artificial Sequence: Synthetic epitope
STVLLSMTHE

SEQ ID NO: 49051 - protein, 10 aa, Artificial Sequence
  Description of Artificial Sequence: Synthetic epitope
STVLQAADQG

SEQ ID NO: 49052 - protein, 10 aa, Artificial Sequence
  Description of Artificial Sequence: Synthetic epitope
STVLSILEAQ

SEQ ID NO: 49053 - protein, 10 aa, Artificial Sequence
  Description of Artificial Sequence: Synthetic epitope
STVQMGLSGS

SEQ ID NO: 49054 - protein, 10 aa, Artificial Sequence
  Description of Artificial Sequence: Synthetic epitope
STVQNVLEEI

SEQ ID NO: 49055 - protein, 10 aa, Artificial Sequence
  Description of Artificial Sequence: Synthetic epitope
STVRKVNNKT

SEQ ID NO: 49056 - protein, 10 aa, Artificial Sequence
  Description of Artificial Sequence: Synthetic epitope
STVRQNMKQA

SEQ ID NO: 49057 - protein, 10 aa, Artificial Sequence
  Description of Artificial Sequence: Synthetic epitope
STVRVETSSH

SEQ ID NO: 49058 - protein, 10 aa, Artificial Sequence
  Description of Artificial Sequence: Synthetic epitope
STVSSGISTV

SEQ ID NO: 49059 - protein, 10 aa, Artificial Sequence
  Description of Artificial Sequence: Synthetic epitope
STVSSGTQTT

SEQ ID NO: 49060 - protein, 10 aa, Artificial Sequence
  Description of Artificial Sequence: Synthetic epitope
STVSSLLQKE

SEQ ID NO: 49061 - protein, 10 aa, Artificial Sequence
  Description of Artificial Sequence: Synthetic epitope
STVSSVNEAF

SEQ ID NO: 49062 - protein, 10 aa, Artificial Sequence
  Description of Artificial Sequence: Synthetic epitope
STVSTKSVST

SEQ ID NO: 49063 - protein, 10 aa, Artificial Sequence
  Description of Artificial Sequence: Synthetic epitope
STVTESTTEI

SEQ ID NO: 49064 - protein, 10 aa, Artificial Sequence
  Description of Artificial Sequence: Synthetic epitope
STVTIKTEDD

SEQ ID NO: 49065 - protein, 10 aa, Artificial Sequence
  Description of Artificial Sequence: Synthetic epitope
STVTQEKLEL

SEQ ID NO: 49066 - protein, 10 aa, Artificial Sequence
  Description of Artificial Sequence: Synthetic epitope
STVTTKVTLP

SEQ ID NO: 49067 - protein, 10 aa, Artificial Sequence
  Description of Artificial Sequence: Synthetic epitope
STVVDIQESQ

SEQ ID NO: 49068 - protein, 10 aa, Artificial Sequence
  Description of Artificial Sequence: Synthetic epitope
STVVGSPTSS

SEQ ID NO: 49069 - protein, 10 aa, Artificial Sequence
  Description of Artificial Sequence: Synthetic epitope
STVVRTLATQ

SEQ ID NO: 49070 - protein, 10 aa, Artificial Sequence
  Description of Artificial Sequence: Synthetic epitope
STWDEIFPLK

SEQ ID NO: 49071 - protein, 10 aa, Artificial Sequence
  Description of Artificial Sequence: Synthetic epitope
STWYSSKPPL

SEQ ID NO: 49072 - protein, 10 aa, Artificial Sequence
  Description of Artificial Sequence: Synthetic epitope
STYIESSTKV

SEQ ID NO: 49073 - protein, 10 aa, Artificial Sequence
  Description of Artificial Sequence: Synthetic epitope
STYKEAETQN

SEQ ID NO: 49074 - protein, 10 aa, Artificial Sequence
  Description of Artificial Sequence: Synthetic epitope
STYKIAEQDF

SEQ ID NO: 49075 - protein, 10 aa, Artificial Sequence
  Description of Artificial Sequence: Synthetic epitope
STYSKYSDRS

SEQ ID NO: 49076 - protein, 10 aa, Artificial Sequence
  Description of Artificial Sequence: Synthetic epitope
STYTYTSRPR

SEQ ID NO: 49077 - protein, 10 aa, Artificial Sequence
  Description of Artificial Sequence: Synthetic epitope
STYYSTSAPK

SEQ ID NO: 49078 - protein, 10 aa, Artificial Sequence
  Description of Artificial Sequence: Synthetic epitope
SVAAGGQKGK

SEQ ID NO: 49079 - protein, 10 aa, Artificial Sequence
  Description of Artificial Sequence: Synthetic epitope
SVAASTGSAV

SEQ ID NO: 49080 - protein, 10 aa, Artificial Sequence
  Description of Artificial Sequence: Synthetic epitope
SVADTNKTKG

SEQ ID NO: 49081 - protein, 10 aa, Artificial Sequence
  Description of Artificial Sequence: Synthetic epitope
SVAEDAAKGT

SEQ ID NO: 49082 - protein, 10 aa, Artificial Sequence
  Description of Artificial Sequence: Synthetic epitope
SVAEINRNLV

SEQ ID NO: 49083 - protein, 10 aa, Artificial Sequence
  Description of Artificial Sequence: Synthetic epitope
SVAETPVHKQ

SEQ ID NO: 49084 - protein, 10 aa, Artificial Sequence
  Description of Artificial Sequence: Synthetic epitope
SVAETQVTPS

SEQ ID NO: 49085 - protein, 10 aa, Artificial Sequence
  Description of Artificial Sequence: Synthetic epitope
SVAKENSLHS

SEQ ID NO: 49086 - protein, 10 aa, Artificial Sequence
  Description of Artificial Sequence: Synthetic epitope
SVALQPSSEA

SEQ ID NO: 49087 - protein, 10 aa, Artificial Sequence
  Description of Artificial Sequence: Synthetic epitope
SVANGSQSES

SEQ ID NO: 49088 - protein, 10 aa, Artificial Sequence
  Description of Artificial Sequence: Synthetic epitope
SVAPSLVRVP

SEQ ID NO: 49089 - protein, 10 aa, Artificial Sequence
  Description of Artificial Sequence: Synthetic epitope
SVARLAVNVM

SEQ ID NO: 49090 - protein, 10 aa, Artificial Sequence
  Description of Artificial Sequence: Synthetic epitope
SVASKLEHTA

SEQ ID NO: 49091 - protein, 10 aa, Artificial Sequence
  Description of Artificial Sequence: Synthetic epitope
SVASLSSENP

SEQ ID NO: 49092 - protein, 10 aa, Artificial Sequence
  Description of Artificial Sequence: Synthetic epitope
SVASMGADSG

SEQ ID NO: 49093 - protein, 10 aa, Artificial Sequence
  Description of Artificial Sequence: Synthetic epitope
SVASPSSGGE

SEQ ID NO: 49094 - protein, 10 aa, Artificial Sequence
  Description of Artificial Sequence: Synthetic epitope
SVASSGLSEN

SEQ ID NO: 49095 - protein, 10 aa, Artificial Sequence
  Description of Artificial Sequence: Synthetic epitope
SVASTNRDEA

SEQ ID NO: 49096 - protein, 10 aa, Artificial Sequence
  Description of Artificial Sequence: Synthetic epitope
SVATGLNMMK

SEQ ID NO: 49097 - protein, 10 aa, Artificial Sequence
  Description of Artificial Sequence: Synthetic epitope
SVATPQSSQQ

SEQ ID NO: 49098 - protein, 10 aa, Artificial Sequence
  Description of Artificial Sequence: Synthetic epitope
SVATVTRSQS

SEQ ID NO: 49099 - protein, 10 aa, Artificial Sequence
  Description of Artificial Sequence: Synthetic epitope
SVAVEASADS

SEQ ID NO: 49100 - protein, 10 aa, Artificial Sequence
  Description of Artificial Sequence: Synthetic epitope
SVDAHLQIGP

SEQ ID NO: 49101 - protein, 10 aa, Artificial Sequence
  Description of Artificial Sequence: Synthetic epitope
SVDFSMGTEP

SEQ ID NO: 49102 - protein, 10 aa, Artificial Sequence
  Description of Artificial Sequence: Synthetic epitope
SVDLQSSRVG

SEQ ID NO: 49103 - protein, 10 aa, Artificial Sequence
  Description of Artificial Sequence: Synthetic epitope
SVDQVRVGQT

SEQ ID NO: 49104 - protein, 10 aa, Artificial Sequence
  Description of Artificial Sequence: Synthetic epitope
SVDSAKISES

SEQ ID NO: 49105 - protein, 10 aa, Artificial Sequence
  Description of Artificial Sequence: Synthetic epitope
SVDSGSEIKS

SEQ ID NO: 49106 - protein, 10 aa, Artificial Sequence
  Description of Artificial Sequence: Synthetic epitope
SVDSGSSEEQ

SEQ ID NO: 49107 - protein, 10 aa, Artificial Sequence
  Description of Artificial Sequence: Synthetic epitope
SVDSSINQSI

SEQ ID NO: 49108 - protein, 10 aa, Artificial Sequence
  Description of Artificial Sequence: Synthetic epitope
SVDVDFVTAQ

SEQ ID NO: 49109 - protein, 10 aa, Artificial Sequence
  Description of Artificial Sequence: Synthetic epitope
SVDYGLNESM

SEQ ID NO: 49110 - protein, 10 aa, Artificial Sequence
  Description of Artificial Sequence: Synthetic epitope
SVDYSNNVHE

SEQ ID NO: 49111 - protein, 10 aa, Artificial Sequence
  Description of Artificial Sequence: Synthetic epitope
SVEADKSSPG

SEQ ID NO: 49112 - protein, 10 aa, Artificial Sequence
  Description of Artificial Sequence: Synthetic epitope
SVEAHGLETA

SEQ ID NO: 49113 - protein, 10 aa, Artificial Sequence
  Description of Artificial Sequence: Synthetic epitope
SVEALLAAEE

SEQ ID NO: 49114 - protein, 10 aa, Artificial Sequence
  Description of Artificial Sequence: Synthetic epitope
SVEDKTDVRK

SEQ ID NO: 49115 - protein, 10 aa, Artificial Sequence
  Description of Artificial Sequence: Synthetic epitope
SVEDMLVQSQ

SEQ ID NO: 49116 - protein, 10 aa, Artificial Sequence
  Description of Artificial Sequence: Synthetic epitope
SVEEAQLAQE

SEQ ID NO: 49117 - protein, 10 aa, Artificial Sequence
  Description of Artificial Sequence: Synthetic epitope
SVEEKANTHL

SEQ ID NO: 49118 - protein, 10 aa, Artificial Sequence
  Description of Artificial Sequence: Synthetic epitope
SVEEKLSGDS

SEQ ID NO: 49119 - protein, 10 aa, Artificial Sequence
  Description of Artificial Sequence: Synthetic epitope
SVEELSAAHT

SEQ ID NO: 49120 - protein, 10 aa, Artificial Sequence
  Description of Artificial Sequence: Synthetic epitope
SVEEMLEMPR

SEQ ID NO: 49121 - protein, 10 aa, Artificial Sequence
  Description of Artificial Sequence: Synthetic epitope
SVEEQLSLIS

SEQ ID NO: 49122 - protein, 10 aa, Artificial Sequence
  Description of Artificial Sequence: Synthetic epitope
SVEEYLVHAL

SEQ ID NO: 49123 - protein, 10 aa, Artificial Sequence
  Description of Artificial Sequence: Synthetic epitope
SVELALKLLD

SEQ ID NO: 49124 - protein, 10 aa, Artificial Sequence
  Description of Artificial Sequence: Synthetic epitope
SVELQMLTNS

SEQ ID NO: 49125 - protein, 10 aa, Artificial Sequence
  Description of Artificial Sequence: Synthetic epitope
SVELVDIGKQ

SEQ ID NO: 49126 - protein, 10 aa, Artificial Sequence
  Description of Artificial Sequence: Synthetic epitope
SVEMGVKSNY

SEQ ID NO: 49127 - protein, 10 aa, Artificial Sequence
  Description of Artificial Sequence: Synthetic epitope
SVEMKKEDFD

SEQ ID NO: 49128 - protein, 10 aa, Artificial Sequence
  Description of Artificial Sequence: Synthetic epitope
SVEPFSYQGE

SEQ ID NO: 49129 - protein, 10 aa, Artificial Sequence
  Description of Artificial Sequence: Synthetic epitope
SVEQSDKVYE

SEQ ID NO: 49130 - protein, 10 aa, Artificial Sequence
  Description of Artificial Sequence: Synthetic epitope
SVESGIVNSD

SEQ ID NO: 49131 - protein, 10 aa, Artificial Sequence
  Description of Artificial Sequence: Synthetic epitope
SVESSQSETL

SEQ ID NO: 49132 - protein, 10 aa, Artificial Sequence
  Description of Artificial Sequence: Synthetic epitope
SVESTAFIME

SEQ ID NO: 49133 - protein, 10 aa, Artificial Sequence
  Description of Artificial Sequence: Synthetic epitope
SVFEEQEEGS

SEQ ID NO: 49134 - protein, 10 aa, Artificial Sequence
  Description of Artificial Sequence: Synthetic epitope
SVFFEMTETF

SEQ ID NO: 49135 - protein, 10 aa, Artificial Sequence
  Description of Artificial Sequence: Synthetic epitope
SVFTSSLFQM

SEQ ID NO: 49136 - protein, 10 aa, Artificial Sequence
  Description of Artificial Sequence: Synthetic epitope
SVGAATRAPP

SEQ ID NO: 49137 - protein, 10 aa, Artificial Sequence
  Description of Artificial Sequence: Synthetic epitope
SVGAESRPQR

SEQ ID NO: 49138 - protein, 10 aa, Artificial Sequence
  Description of Artificial Sequence: Synthetic epitope
SVGAKNATLV

SEQ ID NO: 49139 - protein, 10 aa, Artificial Sequence
  Description of Artificial Sequence: Synthetic epitope
SVGDNALRHD

SEQ ID NO: 49140 - protein, 10 aa, Artificial Sequence
  Description of Artificial Sequence: Synthetic epitope
SVGILGISNV

SEQ ID NO: 49141 - protein, 10 aa, Artificial Sequence
  Description of Artificial Sequence: Synthetic epitope
SVGKISVSSD

SEQ ID NO: 49142 - protein, 10 aa, Artificial Sequence
  Description of Artificial Sequence: Synthetic epitope
SVGKSGTINE

SEQ ID NO: 49143 - protein, 10 aa, Artificial Sequence
  Description of Artificial Sequence: Synthetic epitope
SVGLTNITVT

SEQ ID NO: 49144 - protein, 10 aa, Artificial Sequence
  Description of Artificial Sequence: Synthetic epitope
SVGSEAASAQ

SEQ ID NO: 49145 - protein, 10 aa, Artificial Sequence
  Description of Artificial Sequence: Synthetic epitope
SVGSKFSKTQ

SEQ ID NO: 49146 - protein, 10 aa, Artificial Sequence
  Description of Artificial Sequence: Synthetic epitope
SVGSVTSRPS

SEQ ID NO: 49147 - protein, 10 aa, Artificial Sequence
  Description of Artificial Sequence: Synthetic epitope
SVGTSIKQSD

SEQ ID NO: 49148 - protein, 10 aa, Artificial Sequence
  Description of Artificial Sequence: Synthetic epitope
SVHEAVFEAR

SEQ ID NO: 49149 - protein, 10 aa, Artificial Sequence
  Description of Artificial Sequence: Synthetic epitope
SVHQIRKHAV

SEQ ID NO: 49150 - protein, 10 aa, Artificial Sequence
  Description of Artificial Sequence: Synthetic epitope
SVHVSSERSL

SEQ ID NO: 49151 - protein, 10 aa, Artificial Sequence
  Description of Artificial Sequence: Synthetic epitope
SVIETFISTQ

SEQ ID NO: 49152 - protein, 10 aa, Artificial Sequence
  Description of Artificial Sequence: Synthetic epitope
SVIGSIRLNG

SEQ ID NO: 49153 - protein, 10 aa, Artificial Sequence
  Description of Artificial Sequence: Synthetic epitope
SVIKSVFSSR

SEQ ID NO: 49154 - protein, 10 aa, Artificial Sequence
  Description of Artificial Sequence: Synthetic epitope
SVILASKIEQ

SEQ ID NO: 49155 - protein, 10 aa, Artificial Sequence
  Description of Artificial Sequence: Synthetic epitope
SVILSLEVKL

SEQ ID NO: 49156 - protein, 10 aa, Artificial Sequence
  Description of Artificial Sequence: Synthetic epitope
SVIPEELISQ

SEQ ID NO: 49157 - protein, 10 aa, Artificial Sequence
  Description of Artificial Sequence: Synthetic epitope
SVIRDHAGSA

SEQ ID NO: 49158 - protein, 10 aa, Artificial Sequence
  Description of Artificial Sequence: Synthetic epitope
SVIRSATNTT

SEQ ID NO: 49159 - protein, 10 aa, Artificial Sequence
  Description of Artificial Sequence: Synthetic epitope
SVISSPLLKS

SEQ ID NO: 49160 - protein, 10 aa, Artificial Sequence
  Description of Artificial Sequence: Synthetic epitope
SVKENSSQSK

SEQ ID NO: 49161 - protein, 10 aa, Artificial Sequence
  Description of Artificial Sequence: Synthetic epitope
SVKERHASEM

SEQ ID NO: 49162 - protein, 10 aa, Artificial Sequence
  Description of Artificial Sequence: Synthetic epitope
SVKETGLASK

SEQ ID NO: 49163 - protein, 10 aa, Artificial Sequence
  Description of Artificial Sequence: Synthetic epitope
SVKEVIASTN

SEQ ID NO: 49164 - protein, 10 aa, Artificial Sequence
  Description of Artificial Sequence: Synthetic epitope
SVKGASVDRD

SEQ ID NO: 49165 - protein, 10 aa, Artificial Sequence
  Description of Artificial Sequence: Synthetic epitope
SVKIKKNKDN

SEQ ID NO: 49166 - protein, 10 aa, Artificial Sequence
  Description of Artificial Sequence: Synthetic epitope
SVKKAPDAEE

SEQ ID NO: 49167 - protein, 10 aa, Artificial Sequence
  Description of Artificial Sequence: Synthetic epitope
SVKKMEESLK

SEQ ID NO: 49168 - protein, 10 aa, Artificial Sequence
  Description of Artificial Sequence: Synthetic epitope
SVKKRSVSEI

SEQ ID NO: 49169 - protein, 10 aa, Artificial Sequence
  Description of Artificial Sequence: Synthetic epitope
SVKKVHLQKG

SEQ ID NO: 49170 - protein, 10 aa, Artificial Sequence
  Description of Artificial Sequence: Synthetic epitope
SVKLALASLG

SEQ ID NO: 49171 - protein, 10 aa, Artificial Sequence
  Description of Artificial Sequence: Synthetic epitope
SVKLMAIQNG

SEQ ID NO: 49172 - protein, 10 aa, Artificial Sequence
  Description of Artificial Sequence: Synthetic epitope
SVKRNQAVWS

SEQ ID NO: 49173 - protein, 10 aa, Artificial Sequence
  Description of Artificial Sequence: Synthetic epitope
SVKSEALSLP

SEQ ID NO: 49174 - protein, 10 aa, Artificial Sequence
  Description of Artificial Sequence: Synthetic epitope
SVKSLSISRT

SEQ ID NO: 49175 - protein, 10 aa, Artificial Sequence
  Description of Artificial Sequence: Synthetic epitope
SVKTNKSTKQ

SEQ ID NO: 49176 - protein, 10 aa, Artificial Sequence
  Description of Artificial Sequence: Synthetic epitope
SVKVKEKYLH

SEQ ID NO: 49177 - protein, 10 aa, Artificial Sequence
  Description of Artificial Sequence: Synthetic epitope
SVKYDVEIVE

SEQ ID NO: 49178 - protein, 10 aa, Artificial Sequence
  Description of Artificial Sequence: Synthetic epitope
SVLAKELVEV

SEQ ID NO: 49179 - protein, 10 aa, Artificial Sequence
  Description of Artificial Sequence: Synthetic epitope
SVLEDSALVL

SEQ ID NO: 49180 - protein, 10 aa, Artificial Sequence
  Description of Artificial Sequence: Synthetic epitope
SVLEEAIADG

SEQ ID NO: 49181 - protein, 10 aa, Artificial Sequence
  Description of Artificial Sequence: Synthetic epitope
SVLESAPISS

SEQ ID NO: 49182 - protein, 10 aa, Artificial Sequence
  Description of Artificial Sequence: Synthetic epitope
SVLETVVTGP

SEQ ID NO: 49183 - protein, 10 aa, Artificial Sequence
  Description of Artificial Sequence: Synthetic epitope
SVLEVVSEKP

SEQ ID NO: 49184 - protein, 10 aa, Artificial Sequence
  Description of Artificial Sequence: Synthetic epitope
SVLGSLSSVP

SEQ ID NO: 49185 - protein, 10 aa, Artificial Sequence
  Description of Artificial Sequence: Synthetic epitope
SVLIRVRLEL

SEQ ID NO: 49186 - protein, 10 aa, Artificial Sequence
  Description of Artificial Sequence: Synthetic epitope
SVLISNMSTS

SEQ ID NO: 49187 - protein, 10 aa, Artificial Sequence
  Description of Artificial Sequence: Synthetic epitope
SVLKEAAKLM

SEQ ID NO: 49188 - protein, 10 aa, Artificial Sequence
  Description of Artificial Sequence: Synthetic epitope
SVLKTALLQK

SEQ ID NO: 49189 - protein, 10 aa, Artificial Sequence
  Description of Artificial Sequence: Synthetic epitope
SVLLATVRYL

SEQ ID NO: 49190 - protein, 10 aa, Artificial Sequence
  Description of Artificial Sequence: Synthetic epitope
SVLLELLSQS

SEQ ID NO: 49191 - protein, 10 aa, Artificial Sequence
  Description of Artificial Sequence: Synthetic epitope
SVLLPLVQLE

SEQ ID NO: 49192 - protein, 10 aa, Artificial Sequence
  Description of Artificial Sequence: Synthetic epitope
SVLNHSNQEP

SEQ ID NO: 49193 - protein, 10 aa, Artificial Sequence
  Description of Artificial Sequence: Synthetic epitope
SVLNSHTQDV

SEQ ID NO: 49194 - protein, 10 aa, Artificial Sequence
  Description of Artificial Sequence: Synthetic epitope
SVLPAKSSLA

SEQ ID NO: 49195 - protein, 10 aa, Artificial Sequence
  Description of Artificial Sequence: Synthetic epitope
SVLQANLRDS

SEQ ID NO: 49196 - protein, 10 aa, Artificial Sequence
  Description of Artificial Sequence: Synthetic epitope
SVLQIEQLQS

SEQ ID NO: 49197 - protein, 10 aa, Artificial Sequence
  Description of Artificial Sequence: Synthetic epitope
SVLQINLSNS

SEQ ID NO: 49198 - protein, 10 aa, Artificial Sequence
  Description of Artificial Sequence: Synthetic epitope
SVLQKIRAAQ

SEQ ID NO: 49199 - protein, 10 aa, Artificial Sequence
  Description of Artificial Sequence: Synthetic epitope
SVLQNRIEQL

SEQ ID NO: 49200 - protein, 10 aa, Artificial Sequence
  Description of Artificial Sequence: Synthetic epitope
SVLQQRANLE

SEQ ID NO: 49201 - protein, 10 aa, Artificial Sequence
  Description of Artificial Sequence: Synthetic epitope
SVLRNAIKSS

SEQ ID NO: 49202 - protein, 10 aa, Artificial Sequence
  Description of Artificial Sequence: Synthetic epitope
SVLRVTRRGE

SEQ ID NO: 49203 - protein, 10 aa, Artificial Sequence
  Description of Artificial Sequence: Synthetic epitope
SVLSKADFKT

SEQ ID NO: 49204 - protein, 10 aa, Artificial Sequence
  Description of Artificial Sequence: Synthetic epitope
SVLTQRFKNG

SEQ ID NO: 49205 - protein, 10 aa, Artificial Sequence
  Description of Artificial Sequence: Synthetic epitope
SVLTTVTHST

SEQ ID NO: 49206 - protein, 10 aa, Artificial Sequence
  Description of Artificial Sequence: Synthetic epitope
SVLVSLRLDF

SEQ ID NO: 49207 - protein, 10 aa, Artificial Sequence
  Description of Artificial Sequence: Synthetic epitope
SVLYHHTKNS

SEQ ID NO: 49208 - protein, 10 aa, Artificial Sequence
  Description of Artificial Sequence: Synthetic epitope
SVMASVTSLL

SEQ ID NO: 49209 - protein, 10 aa, Artificial Sequence
  Description of Artificial Sequence: Synthetic epitope
SVMEDEMNGM

SEQ ID NO: 49210 - protein, 10 aa, Artificial Sequence
  Description of Artificial Sequence: Synthetic epitope
SVMEQNTVKE

SEQ ID NO: 49211 - protein, 10 aa, Artificial Sequence
  Description of Artificial Sequence: Synthetic epitope
SVMNSPTATM

SEQ ID NO: 49212 - protein, 10 aa, Artificial Sequence
  Description of Artificial Sequence: Synthetic epitope
SVNELNSQLN

SEQ ID NO: 49213 - protein, 10 aa, Artificial Sequence
  Description of Artificial Sequence: Synthetic epitope
SVNEPLTLNI

SEQ ID NO: 49214 - protein, 10 aa, Artificial Sequence
  Description of Artificial Sequence: Synthetic epitope
SVNISTAGKG

SEQ ID NO: 49215 - protein, 10 aa, Artificial Sequence
  Description of Artificial Sequence: Synthetic epitope
SVNKGQEKAE

SEQ ID NO: 49216 - protein, 10 aa, Artificial Sequence
  Description of Artificial Sequence: Synthetic epitope
SVNLRSINKS

SEQ ID NO: 49217 - protein, 10 aa, Artificial Sequence
  Description of Artificial Sequence: Synthetic epitope
SVNLSNVLKN

SEQ ID NO: 49218 - protein, 10 aa, Artificial Sequence
  Description of Artificial Sequence: Synthetic epitope
SVNSDISKKS

SEQ ID NO: 49219 - protein, 10 aa, Artificial Sequence
  Description of Artificial Sequence: Synthetic epitope
SVNSRPFRVT

SEQ ID NO: 49220 - protein, 10 aa, Artificial Sequence
  Description of Artificial Sequence: Synthetic epitope
SVNVKTTSAS

SEQ ID NO: 49221 - protein, 10 aa, Artificial Sequence
  Description of Artificial Sequence: Synthetic epitope
SVPAQSAKKP

SEQ ID NO: 49222 - protein, 10 aa, Artificial Sequence
  Description of Artificial Sequence: Synthetic epitope
SVPDSESSET

SEQ ID NO: 49223 - protein, 10 aa, Artificial Sequence
  Description of Artificial Sequence: Synthetic epitope
SVPDWWPTVS

SEQ ID NO: 49224 - protein, 10 aa, Artificial Sequence
  Description of Artificial Sequence: Synthetic epitope
SVPEQVMSSN

SEQ ID NO: 49225 - protein, 10 aa, Artificial Sequence
  Description of Artificial Sequence: Synthetic epitope
SVPGSTNTGT

SEQ ID NO: 49226 - protein, 10 aa, Artificial Sequence
  Description of Artificial Sequence: Synthetic epitope
SVPKSMSTEE

SEQ ID NO: 49227 - protein, 10 aa, Artificial Sequence
  Description of Artificial Sequence: Synthetic epitope
SVPKSSVSRV

SEQ ID NO: 49228 - protein, 10 aa, Artificial Sequence
  Description of Artificial Sequence: Synthetic epitope
SVPKVGTVQV

SEQ ID NO: 49229 - protein, 10 aa, Artificial Sequence
  Description of Artificial Sequence: Synthetic epitope
SVPSSELSLP

SEQ ID NO: 49230 - protein, 10 aa, Artificial Sequence
  Description of Artificial Sequence: Synthetic epitope
SVPTGMKIME

SEQ ID NO: 49231 - protein, 10 aa, Artificial Sequence
  Description of Artificial Sequence: Synthetic epitope
SVPTQTATLL

SEQ ID NO: 49232 - protein, 10 aa, Artificial Sequence
  Description of Artificial Sequence: Synthetic epitope
SVPVTLSSRI

SEQ ID NO: 49233 - protein, 10 aa, Artificial Sequence
  Description of Artificial Sequence: Synthetic epitope
SVQAHSALSQ

SEQ ID NO: 49234 - protein, 10 aa, Artificial Sequence
  Description of Artificial Sequence: Synthetic epitope
SVQKGVNSQK

SEQ ID NO: 49235 - protein, 10 aa, Artificial Sequence
  Description of Artificial Sequence: Synthetic epitope
SVQKKAKGPV

SEQ ID NO: 49236 - protein, 10 aa, Artificial Sequence
  Description of Artificial Sequence: Synthetic epitope
SVQLTEKRMD

SEQ ID NO: 49237 - protein, 10 aa, Artificial Sequence
  Description of Artificial Sequence: Synthetic epitope
SVQQSTSQVD

SEQ ID NO: 49238 - protein, 10 aa, Artificial Sequence
  Description of Artificial Sequence: Synthetic epitope
SVQQTQNMKA

SEQ ID NO: 49239 - protein, 10 aa, Artificial Sequence
  Description of Artificial Sequence: Synthetic epitope
SVQSASSTVK

SEQ ID NO: 49240 - protein, 10 aa, Artificial Sequence
  Description of Artificial Sequence: Synthetic epitope
SVQSDESLDL

SEQ ID NO: 49241 - protein, 10 aa, Artificial Sequence
  Description of Artificial Sequence: Synthetic epitope
SVQTKAVNKQ

SEQ ID NO: 49242 - protein, 10 aa, Artificial Sequence
  Description of Artificial Sequence: Synthetic epitope
SVQTPQVQRE

SEQ ID NO: 49243 - protein, 10 aa, Artificial Sequence
  Description of Artificial Sequence: Synthetic epitope
SVQTVIDAEA

SEQ ID NO: 49244 - protein, 10 aa, Artificial Sequence
  Description of Artificial Sequence: Synthetic epitope
SVQVISMEPE

SEQ ID NO: 49245 - protein, 10 aa, Artificial Sequence
  Description of Artificial Sequence: Synthetic epitope
SVQVNSIKFD

SEQ ID NO: 49246 - protein, 10 aa, Artificial Sequence
  Description of Artificial Sequence: Synthetic epitope
SVQVTPEAPA

SEQ ID NO: 49247 - protein, 10 aa, Artificial Sequence
  Description of Artificial Sequence: Synthetic epitope
SVQWLLKHHP

SEQ ID NO: 49248 - protein, 10 aa, Artificial Sequence
  Description of Artificial Sequence: Synthetic epitope
SVRAAGAPPA

SEQ ID NO: 49249 - protein, 10 aa, Artificial Sequence
  Description of Artificial Sequence: Synthetic epitope
SVRGGFNMSS

SEQ ID NO: 49250 - protein, 10 aa, Artificial Sequence
  Description of Artificial Sequence: Synthetic epitope
SVRIRSSVEI

SEQ ID NO: 49251 - protein, 10 aa, Artificial Sequence
  Description of Artificial Sequence: Synthetic epitope
SVRIVTADYY

SEQ ID NO: 49252 - protein, 10 aa, Artificial Sequence
  Description of Artificial Sequence: Synthetic epitope
SVRKASKETS

SEQ ID NO: 49253 - protein, 10 aa, Artificial Sequence
  Description of Artificial Sequence: Synthetic epitope
SVRKNKIPLP

SEQ ID NO: 49254 - protein, 10 aa, Artificial Sequence
  Description of Artificial Sequence: Synthetic epitope
SVRKVEITTE

SEQ ID NO: 49255 - protein, 10 aa, Artificial Sequence
  Description of Artificial Sequence: Synthetic epitope
SVRLRSVSKS

SEQ ID NO: 49256 - protein, 10 aa, Artificial Sequence
  Description of Artificial Sequence: Synthetic epitope
SVRPAVVMQG

SEQ ID NO: 49257 - protein, 10 aa, Artificial Sequence
  Description of Artificial Sequence: Synthetic epitope
SVRQKRTQQI

SEQ ID NO: 49258 - protein, 10 aa, Artificial Sequence
  Description of Artificial Sequence: Synthetic epitope
SVRRSTTYSS

SEQ ID NO: 49259 - protein, 10 aa, Artificial Sequence
  Description of Artificial Sequence: Synthetic epitope
SVRSMLEEVI

SEQ ID NO: 49260 - protein, 10 aa, Artificial Sequence
  Description of Artificial Sequence: Synthetic epitope
SVRTASELGG

SEQ ID NO: 49261 - protein, 10 aa, Artificial Sequence
  Description of Artificial Sequence: Synthetic epitope
SVRTVKQMQV

SEQ ID NO: 49262 - protein, 10 aa, Artificial Sequence
  Description of Artificial Sequence: Synthetic epitope
SVRVEGDRFK

SEQ ID NO: 49263 - protein, 10 aa, Artificial Sequence
  Description of Artificial Sequence: Synthetic epitope
SVSAAKLLAL

SEQ ID NO: 49264 - protein, 10 aa, Artificial Sequence
  Description of Artificial Sequence: Synthetic epitope
SVSAKISSLM

SEQ ID NO: 49265 - protein, 10 aa, Artificial Sequence
  Description of Artificial Sequence: Synthetic epitope
SVSASRVVKP

SEQ ID NO: 49266 - protein, 10 aa, Artificial Sequence
  Description of Artificial Sequence: Synthetic epitope
SVSASVIKSP

SEQ ID NO: 49267 - protein, 10 aa, Artificial Sequence
  Description of Artificial Sequence: Synthetic epitope
SVSDITLQSS

SEQ ID NO: 49268 - protein, 10 aa, Artificial Sequence
  Description of Artificial Sequence: Synthetic epitope
SVSEAALAQP

SEQ ID NO: 49269 - protein, 10 aa, Artificial Sequence
  Description of Artificial Sequence: Synthetic epitope
SVSEKTIGLM

SEQ ID NO: 49270 - protein, 10 aa, Artificial Sequence
  Description of Artificial Sequence: Synthetic epitope
SVSELSRAVR

SEQ ID NO: 49271 - protein, 10 aa, Artificial Sequence
  Description of Artificial Sequence: Synthetic epitope
SVSEPAKVSE

SEQ ID NO: 49272 - protein, 10 aa, Artificial Sequence
  Description of Artificial Sequence: Synthetic epitope
SVSFSKEAKY

SEQ ID NO: 49273 - protein, 10 aa, Artificial Sequence
  Description of Artificial Sequence: Synthetic epitope
SVSGEASVDH

SEQ ID NO: 49274 - protein, 10 aa, Artificial Sequence
  Description of Artificial Sequence: Synthetic epitope
SVSGEVSILK

SEQ ID NO: 49275 - protein, 10 aa, Artificial Sequence
  Description of Artificial Sequence: Synthetic epitope
SVSGLSQITK

SEQ ID NO: 49276 - protein, 10 aa, Artificial Sequence
  Description of Artificial Sequence: Synthetic epitope
SVSHSQEKEG

SEQ ID NO: 49277 - protein, 10 aa, Artificial Sequence
  Description of Artificial Sequence: Synthetic epitope
SVSKASDSQE

SEQ ID NO: 49278 - protein, 10 aa, Artificial Sequence
  Description of Artificial Sequence: Synthetic epitope
SVSKDEAEEV

SEQ ID NO: 49279 - protein, 10 aa, Artificial Sequence
  Description of Artificial Sequence: Synthetic epitope
SVSKEVEGTS

SEQ ID NO: 49280 - protein, 10 aa, Artificial Sequence
  Description of Artificial Sequence: Synthetic epitope
SVSKQESSKG

SEQ ID NO: 49281 - protein, 10 aa, Artificial Sequence
  Description of Artificial Sequence: Synthetic epitope
SVSLAQIIKA

SEQ ID NO: 49282 - protein, 10 aa, Artificial Sequence
  Description of Artificial Sequence: Synthetic epitope
SVSLESSAAE

SEQ ID NO: 49283 - protein, 10 aa, Artificial Sequence
  Description of Artificial Sequence: Synthetic epitope
SVSNLAAVGD

SEQ ID NO: 49284 - protein, 10 aa, Artificial Sequence
  Description of Artificial Sequence: Synthetic epitope
SVSNMVHTAK

SEQ ID NO: 49285 - protein, 10 aa, Artificial Sequence
  Description of Artificial Sequence: Synthetic epitope
SVSPMTDTKT

SEQ ID NO: 49286 - protein, 10 aa, Artificial Sequence
  Description of Artificial Sequence: Synthetic epitope
SVSPTEKKDN

SEQ ID NO: 49287 - protein, 10 aa, Artificial Sequence
  Description of Artificial Sequence: Synthetic epitope
SVSQNAIVSA

SEQ ID NO: 49288 - protein, 10 aa, Artificial Sequence
  Description of Artificial Sequence: Synthetic epitope
SVSQRADARY

SEQ ID NO: 49289 - protein, 10 aa, Artificial Sequence
  Description of Artificial Sequence: Synthetic epitope
SVSQVAVDAQ

SEQ ID NO: 49290 - protein, 10 aa, Artificial Sequence
  Description of Artificial Sequence: Synthetic epitope
SVSRLADSSD

SEQ ID NO: 49291 - protein, 10 aa, Artificial Sequence
  Description of Artificial Sequence: Synthetic epitope
SVSRQTYSTK

SEQ ID NO: 49292 - protein, 10 aa, Artificial Sequence
  Description of Artificial Sequence: Synthetic epitope
SVSSLEAEAY

SEQ ID NO: 49293 - protein, 10 aa, Artificial Sequence
  Description of Artificial Sequence: Synthetic epitope
SVSSNVTAMS

SEQ ID NO: 49294 - protein, 10 aa, Artificial Sequence
  Description of Artificial Sequence: Synthetic epitope
SVSSPYESAI

SEQ ID NO: 49295 - protein, 10 aa, Artificial Sequence
  Description of Artificial Sequence: Synthetic epitope
SVSSQEEKSL

SEQ ID NO: 49296 - protein, 10 aa, Artificial Sequence
  Description of Artificial Sequence: Synthetic epitope
SVSSQPITET

SEQ ID NO: 49297 - protein, 10 aa, Artificial Sequence
  Description of Artificial Sequence: Synthetic epitope
SVSSTNASGN

SEQ ID NO: 49298 - protein, 10 aa, Artificial Sequence
  Description of Artificial Sequence: Synthetic epitope
SVSSTSLDTL

SEQ ID NO: 49299 - protein, 10 aa, Artificial Sequence
  Description of Artificial Sequence: Synthetic epitope
SVSTKANSTK

SEQ ID NO: 49300 - protein, 10 aa, Artificial Sequence
  Description of Artificial Sequence: Synthetic epitope
SVSTQMRRMG

SEQ ID NO: 49301 - protein, 10 aa, Artificial Sequence
  Description of Artificial Sequence: Synthetic epitope
SVSVISISAA

SEQ ID NO: 49302 - protein, 10 aa, Artificial Sequence
  Description of Artificial Sequence: Synthetic epitope
SVSVRAPEEN

SEQ ID NO: 49303 - protein, 10 aa, Artificial Sequence
  Description of Artificial Sequence: Synthetic epitope
SVSVRRLAIL

SEQ ID NO: 49304 - protein, 10 aa, Artificial Sequence
  Description of Artificial Sequence: Synthetic epitope
SVTAESVRQE

SEQ ID NO: 49305 - protein, 10 aa, Artificial Sequence
  Description of Artificial Sequence: Synthetic epitope
SVTEKKLANS

SEQ ID NO: 49306 - protein, 10 aa, Artificial Sequence
  Description of Artificial Sequence: Synthetic epitope
SVTEKKLANS

SEQ ID NO: 49307 - protein, 10 aa, Artificial Sequence
  Description of Artificial Sequence: Synthetic epitope
SVTESGEIKS

SEQ ID NO: 49308 - protein, 10 aa, Artificial Sequence
  Description of Artificial Sequence: Synthetic epitope
SVTEVQLRFA

SEQ ID NO: 49309 - protein, 10 aa, Artificial Sequence
  Description of Artificial Sequence: Synthetic epitope
SVTGVHMKIL

SEQ ID NO: 49310 - protein, 10 aa, Artificial Sequence
  Description of Artificial Sequence: Synthetic epitope
SVTISEKLQK

SEQ ID NO: 49311 - protein, 10 aa, Artificial Sequence
  Description of Artificial Sequence: Synthetic epitope
SVTISQLNEN

SEQ ID NO: 49312 - protein, 10 aa, Artificial Sequence
  Description of Artificial Sequence: Synthetic epitope
SVTISQLNEN

SEQ ID NO: 49313 - protein, 10 aa, Artificial Sequence
  Description of Artificial Sequence: Synthetic epitope
SVTLLEAKGK

SEQ ID NO: 49314 - protein, 10 aa, Artificial Sequence
  Description of Artificial Sequence: Synthetic epitope
SVTNVSVLSS

SEQ ID NO: 49315 - protein, 10 aa, Artificial Sequence
  Description of Artificial Sequence: Synthetic epitope
SVTPAAKRHQ

SEQ ID NO: 49316 - protein, 10 aa, Artificial Sequence
  Description of Artificial Sequence: Synthetic epitope
SVTPAVSVNN

SEQ ID NO: 49317 - protein, 10 aa, Artificial Sequence
  Description of Artificial Sequence: Synthetic epitope
SVTQGAALNH

SEQ ID NO: 49318 - protein, 10 aa, Artificial Sequence
  Description of Artificial Sequence: Synthetic epitope
SVTQGMESAY

SEQ ID NO: 49319 - protein, 10 aa, Artificial Sequence
  Description of Artificial Sequence: Synthetic epitope
SVTTIKTFNH

SEQ ID NO: 49320 - protein, 10 aa, Artificial Sequence
  Description of Artificial Sequence: Synthetic epitope
SVTTLAMKAK

SEQ ID NO: 49321 - protein, 10 aa, Artificial Sequence
  Description of Artificial Sequence: Synthetic epitope
SVTTSPQSDM

SEQ ID NO: 49322 - protein, 10 aa, Artificial Sequence
  Description of Artificial Sequence: Synthetic epitope
SVTTVSLPSS

SEQ ID NO: 49323 - protein, 10 aa, Artificial Sequence
  Description of Artificial Sequence: Synthetic epitope
SVTVSSNSEP

SEQ ID NO: 49324 - protein, 10 aa, Artificial Sequence
  Description of Artificial Sequence: Synthetic epitope
SVTVSTIDEE

SEQ ID NO: 49325 - protein, 10 aa, Artificial Sequence
  Description of Artificial Sequence: Synthetic epitope
SVVDQKLSSE

SEQ ID NO: 49326 - protein, 10 aa, Artificial Sequence
  Description of Artificial Sequence: Synthetic epitope
SVVKSHSITN

SEQ ID NO: 49327 - protein, 10 aa, Artificial Sequence
  Description of Artificial Sequence: Synthetic epitope
SVVKVVGSNI

SEQ ID NO: 49328 - protein, 10 aa, Artificial Sequence
  Description of Artificial Sequence: Synthetic epitope
SVVLEHLAPS

SEQ ID NO: 49329 - protein, 10 aa, Artificial Sequence
  Description of Artificial Sequence: Synthetic epitope
SVVNLQEMVL

SEQ ID NO: 49330 - protein, 10 aa, Artificial Sequence
  Description of Artificial Sequence: Synthetic epitope
SVVNTLLFWG

SEQ ID NO: 49331 - protein, 10 aa, Artificial Sequence
  Description of Artificial Sequence: Synthetic epitope
SVVRKNLLSD

SEQ ID NO: 49332 - protein, 10 aa, Artificial Sequence
  Description of Artificial Sequence: Synthetic epitope
SVVSESDDVG

SEQ ID NO: 49333 - protein, 10 aa, Artificial Sequence
  Description of Artificial Sequence: Synthetic epitope
SVVSQALHDL

SEQ ID NO: 49334 - protein, 10 aa, Artificial Sequence
  Description of Artificial Sequence: Synthetic epitope
SVVSSTEFVT

SEQ ID NO: 49335 - protein, 10 aa, Artificial Sequence
  Description of Artificial Sequence: Synthetic epitope
SVVSSVLTEK

SEQ ID NO: 49336 - protein, 10 aa, Artificial Sequence
  Description of Artificial Sequence: Synthetic epitope
SVVTRVVNLP

SEQ ID NO: 49337 - protein, 10 aa, Artificial Sequence
  Description of Artificial Sequence: Synthetic epitope
SVVWANLPQK

SEQ ID NO: 49338 - protein, 10 aa, Artificial Sequence
  Description of Artificial Sequence: Synthetic epitope
SVWVLQSPDH

SEQ ID NO: 49339 - protein, 10 aa, Artificial Sequence
  Description of Artificial Sequence: Synthetic epitope
SVYKQLIEAP

SEQ ID NO: 49340 - protein, 10 aa, Artificial Sequence
  Description of Artificial Sequence: Synthetic epitope
SVYSELNKIE

SEQ ID NO: 49341 - protein, 10 aa, Artificial Sequence
  Description of Artificial Sequence: Synthetic epitope
SWAPAMSNET

SEQ ID NO: 49342 - protein, 10 aa, Artificial Sequence
  Description of Artificial Sequence: Synthetic epitope
SWAVQTFKAA

SEQ ID NO: 49343 - protein, 10 aa, Artificial Sequence
  Description of Artificial Sequence: Synthetic epitope
SWDSKQKKMR

SEQ ID NO: 49344 - protein, 10 aa, Artificial Sequence
  Description of Artificial Sequence: Synthetic epitope
SWEFIVSTVD

SEQ ID NO: 49345 - protein, 10 aa, Artificial Sequence
  Description of Artificial Sequence: Synthetic epitope
SWEGLSSHTS

SEQ ID NO: 49346 - protein, 10 aa, Artificial Sequence
  Description of Artificial Sequence: Synthetic epitope
SWFQSTVSKE

SEQ ID NO: 49347 - protein, 10 aa, Artificial Sequence
  Description of Artificial Sequence: Synthetic epitope
SWFQTVGESA

SEQ ID NO: 49348 - protein, 10 aa, Artificial Sequence
  Description of Artificial Sequence: Synthetic epitope
SWIGPYEQVQ

SEQ ID NO: 49349 - protein, 10 aa, Artificial Sequence
  Description of Artificial Sequence: Synthetic epitope
SWKDKVAKGY

SEQ ID NO: 49350 - protein, 10 aa, Artificial Sequence
  Description of Artificial Sequence: Synthetic epitope
SWKFNDQLFP

SEQ ID NO: 49351 - protein, 10 aa, Artificial Sequence
  Description of Artificial Sequence: Synthetic epitope
SWLLTQDSTA

SEQ ID NO: 49352 - protein, 10 aa, Artificial Sequence
  Description of Artificial Sequence: Synthetic epitope
SWLRSIQQVL

SEQ ID NO: 49353 - protein, 10 aa, Artificial Sequence
  Description of Artificial Sequence: Synthetic epitope
SWMNKIMSYS

SEQ ID NO: 49354 - protein, 10 aa, Artificial Sequence
  Description of Artificial Sequence: Synthetic epitope
SWNAVPASIK

SEQ ID NO: 49355 - protein, 10 aa, Artificial Sequence
  Description of Artificial Sequence: Synthetic epitope
SWPQRQVDIA

SEQ ID NO: 49356 - protein, 10 aa, Artificial Sequence
  Description of Artificial Sequence: Synthetic epitope
SWQEAGTSAK

SEQ ID NO: 49357 - protein, 10 aa, Artificial Sequence
  Description of Artificial Sequence: Synthetic epitope
SWQENISLKE

SEQ ID NO: 49358 - protein, 10 aa, Artificial Sequence
  Description of Artificial Sequence: Synthetic epitope
SWQGENQSQR

SEQ ID NO: 49359 - protein, 10 aa, Artificial Sequence
  Description of Artificial Sequence: Synthetic epitope
SWQIETKYST

SEQ ID NO: 49360 - protein, 10 aa, Artificial Sequence
  Description of Artificial Sequence: Synthetic epitope
SWQQMDQNKA

SEQ ID NO: 49361 - protein, 10 aa, Artificial Sequence
  Description of Artificial Sequence: Synthetic epitope
SWSAVAQTKR

SEQ ID NO: 49362 - protein, 10 aa, Artificial Sequence
  Description of Artificial Sequence: Synthetic epitope
SWSTASLDSQ

SEQ ID NO: 49363 - protein, 10 aa, Artificial Sequence
  Description of Artificial Sequence: Synthetic epitope
SWSTKYKYTE

SEQ ID NO: 49364 - protein, 10 aa, Artificial Sequence
  Description of Artificial Sequence: Synthetic epitope
SWSTLKTQDQ

SEQ ID NO: 49365 - protein, 10 aa, Artificial Sequence
  Description of Artificial Sequence: Synthetic epitope
SWVNFMNKMG

SEQ ID NO: 49366 - protein, 10 aa, Artificial Sequence
  Description of Artificial Sequence: Synthetic epitope
SWVVSKRGKD

SEQ ID NO: 49367 - protein, 10 aa, Artificial Sequence
  Description of Artificial Sequence: Synthetic epitope
SYAANLTDSA

SEQ ID NO: 49368 - protein, 10 aa, Artificial Sequence
  Description of Artificial Sequence: Synthetic epitope
SYAASSQQAT

SEQ ID NO: 49369 - protein, 10 aa, Artificial Sequence
  Description of Artificial Sequence: Synthetic epitope
SYAEMAEDYP

SEQ ID NO: 49370 - protein, 10 aa, Artificial Sequence
  Description of Artificial Sequence: Synthetic epitope
SYAERKLDSD

SEQ ID NO: 49371 - protein, 10 aa, Artificial Sequence
  Description of Artificial Sequence: Synthetic epitope
SYAKEFQLSA

SEQ ID NO: 49372 - protein, 10 aa, Artificial Sequence
  Description of Artificial Sequence: Synthetic epitope
SYDLSSAISV

SEQ ID NO: 49373 - protein, 10 aa, Artificial Sequence
  Description of Artificial Sequence: Synthetic epitope
SYDWMMLTPK

SEQ ID NO: 49374 - protein, 10 aa, Artificial Sequence
  Description of Artificial Sequence: Synthetic epitope
SYEAMMDDQN

SEQ ID NO: 49375 - protein, 10 aa, Artificial Sequence
  Description of Artificial Sequence: Synthetic epitope
SYEEAGFKSQ

SEQ ID NO: 49376 - protein, 10 aa, Artificial Sequence
  Description of Artificial Sequence: Synthetic epitope
SYEHYESRKK

SEQ ID NO: 49377 - protein, 10 aa, Artificial Sequence
  Description of Artificial Sequence: Synthetic epitope
SYEVINIQAT

SEQ ID NO: 49378 - protein, 10 aa, Artificial Sequence
  Description of Artificial Sequence: Synthetic epitope
SYFDAFIQQG

SEQ ID NO: 49379 - protein, 10 aa, Artificial Sequence
  Description of Artificial Sequence: Synthetic epitope
SYFDMKTITT

SEQ ID NO: 49380 - protein, 10 aa, Artificial Sequence
  Description of Artificial Sequence: Synthetic epitope
SYFKIFKTKH

SEQ ID NO: 49381 - protein, 10 aa, Artificial Sequence
  Description of Artificial Sequence: Synthetic epitope
SYGKAVSSQT

SEQ ID NO: 49382 - protein, 10 aa, Artificial Sequence
  Description of Artificial Sequence: Synthetic epitope
SYGKLFESVE

SEQ ID NO: 49383 - protein, 10 aa, Artificial Sequence
  Description of Artificial Sequence: Synthetic epitope
SYGQKLSKLA

SEQ ID NO: 49384 - protein, 10 aa, Artificial Sequence
  Description of Artificial Sequence: Synthetic epitope
SYGVSRLSGS

SEQ ID NO: 49385 - protein, 10 aa, Artificial Sequence
  Description of Artificial Sequence: Synthetic epitope
SYIARQLQEQ

SEQ ID NO: 49386 - protein, 10 aa, Artificial Sequence
  Description of Artificial Sequence: Synthetic epitope
SYIFQKISQG

SEQ ID NO: 49387 - protein, 10 aa, Artificial Sequence
  Description of Artificial Sequence: Synthetic epitope
SYIKEMQIVD

SEQ ID NO: 49388 - protein, 10 aa, Artificial Sequence
  Description of Artificial Sequence: Synthetic epitope
SYIKEQTQDQ

SEQ ID NO: 49389 - protein, 10 aa, Artificial Sequence
  Description of Artificial Sequence: Synthetic epitope
SYILQKSTFE

SEQ ID NO: 49390 - protein, 10 aa, Artificial Sequence
  Description of Artificial Sequence: Synthetic epitope
SYILSSAETP

SEQ ID NO: 49391 - protein, 10 aa, Artificial Sequence
  Description of Artificial Sequence: Synthetic epitope
SYIQSEFASV

SEQ ID NO: 49392 - protein, 10 aa, Artificial Sequence
  Description of Artificial Sequence: Synthetic epitope
SYKALVALRR

SEQ ID NO: 49393 - protein, 10 aa, Artificial Sequence
  Description of Artificial Sequence: Synthetic epitope
SYKHEGLAET

SEQ ID NO: 49394 - protein, 10 aa, Artificial Sequence
  Description of Artificial Sequence: Synthetic epitope
SYKPYVQEAE

SEQ ID NO: 49395 - protein, 10 aa, Artificial Sequence
  Description of Artificial Sequence: Synthetic epitope
SYKSNEDLFS

SEQ ID NO: 49396 - protein, 10 aa, Artificial Sequence
  Description of Artificial Sequence: Synthetic epitope
SYKTVKAETQ

SEQ ID NO: 49397 - protein, 10 aa, Artificial Sequence
  Description of Artificial Sequence: Synthetic epitope
SYLDEAASAP

SEQ ID NO: 49398 - protein, 10 aa, Artificial Sequence
  Description of Artificial Sequence: Synthetic epitope
SYLSASTRHR

SEQ ID NO: 49399 - protein, 10 aa, Artificial Sequence
  Description of Artificial Sequence: Synthetic epitope
SYLSTISLEE

SEQ ID NO: 49400 - protein, 10 aa, Artificial Sequence
  Description of Artificial Sequence: Synthetic epitope
SYLTSASSLA

SEQ ID NO: 49401 - protein, 10 aa, Artificial Sequence
  Description of Artificial Sequence: Synthetic epitope
SYMREKAVSP

SEQ ID NO: 49402 - protein, 10 aa, Artificial Sequence
  Description of Artificial Sequence: Synthetic epitope
SYMRLTEKED

SEQ ID NO: 49403 - protein, 10 aa, Artificial Sequence
  Description of Artificial Sequence: Synthetic epitope
SYNGKQVYKE

SEQ ID NO: 49404 - protein, 10 aa, Artificial Sequence
  Description of Artificial Sequence: Synthetic epitope
SYNLELRSFP

SEQ ID NO: 49405 - protein, 10 aa, Artificial Sequence
  Description of Artificial Sequence: Synthetic epitope
SYNLLEDLPS

SEQ ID NO: 49406 - protein, 10 aa, Artificial Sequence
  Description of Artificial Sequence: Synthetic epitope
SYNQYYQQYQ

SEQ ID NO: 49407 - protein, 10 aa, Artificial Sequence
  Description of Artificial Sequence: Synthetic epitope
SYNYPQKMMG

SEQ ID NO: 49408 - protein, 10 aa, Artificial Sequence
  Description of Artificial Sequence: Synthetic epitope
SYPDPILLMK

SEQ ID NO: 49409 - protein, 10 aa, Artificial Sequence
  Description of Artificial Sequence: Synthetic epitope
SYPLLIIREF

SEQ ID NO: 49410 - protein, 10 aa, Artificial Sequence
  Description of Artificial Sequence: Synthetic epitope
SYPLSNSLMQ

SEQ ID NO: 49411 - protein, 10 aa, Artificial Sequence
  Description of Artificial Sequence: Synthetic epitope
SYPLSVSPME

SEQ ID NO: 49412 - protein, 10 aa, Artificial Sequence
  Description of Artificial Sequence: Synthetic epitope
SYPPTYNVKD

SEQ ID NO: 49413 - protein, 10 aa, Artificial Sequence
  Description of Artificial Sequence: Synthetic epitope
SYPTSQERTQ

SEQ ID NO: 49414 - protein, 10 aa, Artificial Sequence
  Description of Artificial Sequence: Synthetic epitope
SYPVRVTDKT

SEQ ID NO: 49415 - protein, 10 aa, Artificial Sequence
  Description of Artificial Sequence: Synthetic epitope
SYQMKSEKVP

SEQ ID NO: 49416 - protein, 10 aa, Artificial Sequence
  Description of Artificial Sequence: Synthetic epitope
SYQVYSKIQA

SEQ ID NO: 49417 - protein, 10 aa, Artificial Sequence
  Description of Artificial Sequence: Synthetic epitope
SYRASEQKLR

SEQ ID NO: 49418 - protein, 10 aa, Artificial Sequence
  Description of Artificial Sequence: Synthetic epitope
SYRESQEKVM

SEQ ID NO: 49419 - protein, 10 aa, Artificial Sequence
  Description of Artificial Sequence: Synthetic epitope
SYRKATLFED

SEQ ID NO: 49420 - protein, 10 aa, Artificial Sequence
  Description of Artificial Sequence: Synthetic epitope
SYRKINTHIL

SEQ ID NO: 49421 - protein, 10 aa, Artificial Sequence
  Description of Artificial Sequence: Synthetic epitope
SYRVQRSRSK

SEQ ID NO: 49422 - protein, 10 aa, Artificial Sequence
  Description of Artificial Sequence: Synthetic epitope
SYSDIAARAY

SEQ ID NO: 49423 - protein, 10 aa, Artificial Sequence
  Description of Artificial Sequence: Synthetic epitope
SYSEAERESN

SEQ ID NO: 49424 - protein, 10 aa, Artificial Sequence
  Description of Artificial Sequence: Synthetic epitope
SYSESSEAAQ

SEQ ID NO: 49425 - protein, 10 aa, Artificial Sequence
  Description of Artificial Sequence: Synthetic epitope
SYSIKSRFTD

SEQ ID NO: 49426 - protein, 10 aa, Artificial Sequence
  Description of Artificial Sequence: Synthetic epitope
SYSILESVSK

SEQ ID NO: 49427 - protein, 10 aa, Artificial Sequence
  Description of Artificial Sequence: Synthetic epitope
SYSMPVHAAV

SEQ ID NO: 49428 - protein, 10 aa, Artificial Sequence
  Description of Artificial Sequence: Synthetic epitope
SYSRFYAKPL

SEQ ID NO: 49429 - protein, 10 aa, Artificial Sequence
  Description of Artificial Sequence: Synthetic epitope
SYSRSSAVKY

SEQ ID NO: 49430 - protein, 10 aa, Artificial Sequence
  Description of Artificial Sequence: Synthetic epitope
SYSSASRAQN

SEQ ID NO: 49431 - protein, 10 aa, Artificial Sequence
  Description of Artificial Sequence: Synthetic epitope
SYSSASTRGT

SEQ ID NO: 49432 - protein, 10 aa, Artificial Sequence
  Description of Artificial Sequence: Synthetic epitope
SYSSIASEFG

SEQ ID NO: 49433 - protein, 10 aa, Artificial Sequence
  Description of Artificial Sequence: Synthetic epitope
SYSSISEATG

SEQ ID NO: 49434 - protein, 10 aa, Artificial Sequence
  Description of Artificial Sequence: Synthetic epitope
SYSSQTMLLR

SEQ ID NO: 49435 - protein, 10 aa, Artificial Sequence
  Description of Artificial Sequence: Synthetic epitope
SYSVEQLQPA

SEQ ID NO: 49436 - protein, 10 aa, Artificial Sequence
  Description of Artificial Sequence: Synthetic epitope
SYSVPSLNSE

SEQ ID NO: 49437 - protein, 10 aa, Artificial Sequence
  Description of Artificial Sequence: Synthetic epitope
SYSVSESPFF

SEQ ID NO: 49438 - protein, 10 aa, Artificial Sequence
  Description of Artificial Sequence: Synthetic epitope
SYTASSIAQK

SEQ ID NO: 49439 - protein, 10 aa, Artificial Sequence
  Description of Artificial Sequence: Synthetic epitope
SYTDELHAVA

SEQ ID NO: 49440 - protein, 10 aa, Artificial Sequence
  Description of Artificial Sequence: Synthetic epitope
SYTDESNEKK

SEQ ID NO: 49441 - protein, 10 aa, Artificial Sequence
  Description of Artificial Sequence: Synthetic epitope
SYTEAVSSQE

SEQ ID NO: 49442 - protein, 10 aa, Artificial Sequence
  Description of Artificial Sequence: Synthetic epitope
SYTIDLLSAE

SEQ ID NO: 49443 - protein, 10 aa, Artificial Sequence
  Description of Artificial Sequence: Synthetic epitope
SYTKLTLQPG

SEQ ID NO: 49444 - protein, 10 aa, Artificial Sequence
  Description of Artificial Sequence: Synthetic epitope
SYTLKNDYET

SEQ ID NO: 49445 - protein, 10 aa, Artificial Sequence
  Description of Artificial Sequence: Synthetic epitope
SYTLSETQAE

SEQ ID NO: 49446 - protein, 10 aa, Artificial Sequence
  Description of Artificial Sequence: Synthetic epitope
SYTSDRERQL

SEQ ID NO: 49447 - protein, 10 aa, Artificial Sequence
  Description of Artificial Sequence: Synthetic epitope
SYTSKKSSKQ

SEQ ID NO: 49448 - protein, 10 aa, Artificial Sequence
  Description of Artificial Sequence: Synthetic epitope
SYTSQSSTEY

SEQ ID NO: 49449 - protein, 10 aa, Artificial Sequence
  Description of Artificial Sequence: Synthetic epitope
SYTTHPQMQQ

SEQ ID NO: 49450 - protein, 10 aa, Artificial Sequence
  Description of Artificial Sequence: Synthetic epitope
SYVFAIDEVL

SEQ ID NO: 49451 - protein, 10 aa, Artificial Sequence
  Description of Artificial Sequence: Synthetic epitope
SYVSEVEITP

SEQ ID NO: 49452 - protein, 10 aa, Artificial Sequence
  Description of Artificial Sequence: Synthetic epitope
SYVSKAESTP

SEQ ID NO: 49453 - protein, 10 aa, Artificial Sequence
  Description of Artificial Sequence: Synthetic epitope
SYVSTWHDED

SEQ ID NO: 49454 - protein, 10 aa, Artificial Sequence
  Description of Artificial Sequence: Synthetic epitope
SYWTSVHPEY

SEQ ID NO: 49455 - protein, 10 aa, Artificial Sequence
  Description of Artificial Sequence: Synthetic epitope
SYYEAKARRE

SEQ ID NO: 49456 - protein, 10 aa, Artificial Sequence
  Description of Artificial Sequence: Synthetic epitope
SYYQTLVNST

SEQ ID NO: 49457 - protein, 10 aa, Artificial Sequence
  Description of Artificial Sequence: Synthetic epitope
TAADESPASE

SEQ ID NO: 49458 - protein, 10 aa, Artificial Sequence
  Description of Artificial Sequence: Synthetic epitope
TAADKSQDSG

SEQ ID NO: 49459 - protein, 10 aa, Artificial Sequence
  Description of Artificial Sequence: Synthetic epitope
TAADRQAEDQ

SEQ ID NO: 49460 - protein, 10 aa, Artificial Sequence
  Description of Artificial Sequence: Synthetic epitope
TAADSESTTN

SEQ ID NO: 49461 - protein, 10 aa, Artificial Sequence
  Description of Artificial Sequence: Synthetic epitope
TAADSSGSAA

SEQ ID NO: 49462 - protein, 10 aa, Artificial Sequence
  Description of Artificial Sequence: Synthetic epitope
TAAEANEIED

SEQ ID NO: 49463 - protein, 10 aa, Artificial Sequence
  Description of Artificial Sequence: Synthetic epitope
TAAEKKTLDK

SEQ ID NO: 49464 - protein, 10 aa, Artificial Sequence
  Description of Artificial Sequence: Synthetic epitope
TAAHQTNRQE

SEQ ID NO: 49465 - protein, 10 aa, Artificial Sequence
  Description of Artificial Sequence: Synthetic epitope
TAAKGKRTKK

SEQ ID NO: 49466 - protein, 10 aa, Artificial Sequence
  Description of Artificial Sequence: Synthetic epitope
TAAKLGKTRL

SEQ ID NO: 49467 - protein, 10 aa, Artificial Sequence
  Description of Artificial Sequence: Synthetic epitope
TAAKPVAAKP

SEQ ID NO: 49468 - protein, 10 aa, Artificial Sequence
  Description of Artificial Sequence: Synthetic epitope
TAALEKSKLN

SEQ ID NO: 49469 - protein, 10 aa, Artificial Sequence
  Description of Artificial Sequence: Synthetic epitope
TAALTSITAS

SEQ ID NO: 49470 - protein, 10 aa, Artificial Sequence
  Description of Artificial Sequence: Synthetic epitope
TAAMLNMSVD

SEQ ID NO: 49471 - protein, 10 aa, Artificial Sequence
  Description of Artificial Sequence: Synthetic epitope
TAANLSLSSQ

SEQ ID NO: 49472 - protein, 10 aa, Artificial Sequence
  Description of Artificial Sequence: Synthetic epitope
TAANRMEPLW

SEQ ID NO: 49473 - protein, 10 aa, Artificial Sequence
  Description of Artificial Sequence: Synthetic epitope
TAAPASASVS

SEQ ID NO: 49474 - protein, 10 aa, Artificial Sequence
  Description of Artificial Sequence: Synthetic epitope
TAAQKEKDAT

SEQ ID NO: 49475 - protein, 10 aa, Artificial Sequence
  Description of Artificial Sequence: Synthetic epitope
TAAQVAQPVP

SEQ ID NO: 49476 - protein, 10 aa, Artificial Sequence
  Description of Artificial Sequence: Synthetic epitope
TAARRDAASQ

SEQ ID NO: 49477 - protein, 10 aa, Artificial Sequence
  Description of Artificial Sequence: Synthetic epitope
TAARRDAASQ

SEQ ID NO: 49478 - protein, 10 aa, Artificial Sequence
  Description of Artificial Sequence: Synthetic epitope
TAASAARNPS

SEQ ID NO: 49479 - protein, 10 aa, Artificial Sequence
  Description of Artificial Sequence: Synthetic epitope
TAASEVPSFL

SEQ ID NO: 49480 - protein, 10 aa, Artificial Sequence
  Description of Artificial Sequence: Synthetic epitope
TAASKKAPAQ

SEQ ID NO: 49481 - protein, 10 aa, Artificial Sequence
  Description of Artificial Sequence: Synthetic epitope
TAASPSLIKE

SEQ ID NO: 49482 - protein, 10 aa, Artificial Sequence
  Description of Artificial Sequence: Synthetic epitope
TAASRDQVPA

SEQ ID NO: 49483 - protein, 10 aa, Artificial Sequence
  Description of Artificial Sequence: Synthetic epitope
TAASSMTAAS

SEQ ID NO: 49484 - protein, 10 aa, Artificial Sequence
  Description of Artificial Sequence: Synthetic epitope
TAASSQAEKS

SEQ ID NO: 49485 - protein, 10 aa, Artificial Sequence
  Description of Artificial Sequence: Synthetic epitope
TAASVDGAYS

SEQ ID NO: 49486 - protein, 10 aa, Artificial Sequence
  Description of Artificial Sequence: Synthetic epitope
TAASVIDTAS

SEQ ID NO: 49487 - protein, 10 aa, Artificial Sequence
  Description of Artificial Sequence: Synthetic epitope
TAATAKTRPS

SEQ ID NO: 49488 - protein, 10 aa, Artificial Sequence
  Description of Artificial Sequence: Synthetic epitope
TAATASVGSG

SEQ ID NO: 49489 - protein, 10 aa, Artificial Sequence
  Description of Artificial Sequence: Synthetic epitope
TAATTPRITR

SEQ ID NO: 49490 - protein, 10 aa, Artificial Sequence
  Description of Artificial Sequence: Synthetic epitope
TAATTSTEPI

SEQ ID NO: 49491 - protein, 10 aa, Artificial Sequence
  Description of Artificial Sequence: Synthetic epitope
TAAVATTSIT

SEQ ID NO: 49492 - protein, 10 aa, Artificial Sequence
  Description of Artificial Sequence: Synthetic epitope
TAAVRPKSLA

SEQ ID NO: 49493 - protein, 10 aa, Artificial Sequence
  Description of Artificial Sequence: Synthetic epitope
TAAVVTEKQQ

SEQ ID NO: 49494 - protein, 10 aa, Artificial Sequence
  Description of Artificial Sequence: Synthetic epitope
TADELVLHSW

SEQ ID NO: 49495 - protein, 10 aa, Artificial Sequence
  Description of Artificial Sequence: Synthetic epitope
TADETKDYMN

SEQ ID NO: 49496 - protein, 10 aa, Artificial Sequence
  Description of Artificial Sequence: Synthetic epitope
TADFRDSKLQ

SEQ ID NO: 49497 - protein, 10 aa, Artificial Sequence
  Description of Artificial Sequence: Synthetic epitope
TADHSSQERE

SEQ ID NO: 49498 - protein, 10 aa, Artificial Sequence
  Description of Artificial Sequence: Synthetic epitope
TADKSQKQSL

SEQ ID NO: 49499 - protein, 10 aa, Artificial Sequence
  Description of Artificial Sequence: Synthetic epitope
TADKSTSTSD

SEQ ID NO: 49500 - protein, 10 aa, Artificial Sequence
  Description of Artificial Sequence: Synthetic epitope
TADNATATNL

SEQ ID NO: 49501 - protein, 10 aa, Artificial Sequence
  Description of Artificial Sequence: Synthetic epitope
TADSKAARLR

SEQ ID NO: 49502 - protein, 10 aa, Artificial Sequence
  Description of Artificial Sequence: Synthetic epitope
TADSSAQPVV

SEQ ID NO: 49503 - protein, 10 aa, Artificial Sequence
  Description of Artificial Sequence: Synthetic epitope
TADTAVTGLA

SEQ ID NO: 49504 - protein, 10 aa, Artificial Sequence
  Description of Artificial Sequence: Synthetic epitope
TADTQGHEHQ

SEQ ID NO: 49505 - protein, 10 aa, Artificial Sequence
  Description of Artificial Sequence: Synthetic epitope
TADTSFENNK

SEQ ID NO: 49506 - protein, 10 aa, Artificial Sequence
  Description of Artificial Sequence: Synthetic epitope
TADVQVFPRP

SEQ ID NO: 49507 - protein, 10 aa, Artificial Sequence
  Description of Artificial Sequence: Synthetic epitope
TADVTSAVMG

SEQ ID NO: 49508 - protein, 10 aa, Artificial Sequence
  Description of Artificial Sequence: Synthetic epitope
TAEAKPIIRS

SEQ ID NO: 49509 - protein, 10 aa, Artificial Sequence
  Description of Artificial Sequence: Synthetic epitope
TAEEQEMMEN

SEQ ID NO: 49510 - protein, 10 aa, Artificial Sequence
  Description of Artificial Sequence: Synthetic epitope
TAEESANEYY

SEQ ID NO: 49511 - protein, 10 aa, Artificial Sequence
  Description of Artificial Sequence: Synthetic epitope
TAEETATLVM

SEQ ID NO: 49512 - protein, 10 aa, Artificial Sequence
  Description of Artificial Sequence: Synthetic epitope
TAEFKKTDKS

SEQ ID NO: 49513 - protein, 10 aa, Artificial Sequence
  Description of Artificial Sequence: Synthetic epitope
TAEIQDIEAK

SEQ ID NO: 49514 - protein, 10 aa, Artificial Sequence
  Description of Artificial Sequence: Synthetic epitope
TAELALTNHK

SEQ ID NO: 49515 - protein, 10 aa, Artificial Sequence
  Description of Artificial Sequence: Synthetic epitope
TAELSSQEET

SEQ ID NO: 49516 - protein, 10 aa, Artificial Sequence
  Description of Artificial Sequence: Synthetic epitope
TAELTIAKDQ

SEQ ID NO: 49517 - protein, 10 aa, Artificial Sequence
  Description of Artificial Sequence: Synthetic epitope
TAEMQEGLLA

SEQ ID NO: 49518 - protein, 10 aa, Artificial Sequence
  Description of Artificial Sequence: Synthetic epitope
TAENATSGET

SEQ ID NO: 49519 - protein, 10 aa, Artificial Sequence
  Description of Artificial Sequence: Synthetic epitope
TAENETTEKE

SEQ ID NO: 49520 - protein, 10 aa, Artificial Sequence
  Description of Artificial Sequence: Synthetic epitope
TAEQTRKLTD

SEQ ID NO: 49521 - protein, 10 aa, Artificial Sequence
  Description of Artificial Sequence: Synthetic epitope
TAEQTRKLTD

SEQ ID NO: 49522 - protein, 10 aa, Artificial Sequence
  Description of Artificial Sequence: Synthetic epitope
TAERGMVKPM

SEQ ID NO: 49523 - protein, 10 aa, Artificial Sequence
  Description of Artificial Sequence: Synthetic epitope
TAESIISPSL

SEQ ID NO: 49524 - protein, 10 aa, Artificial Sequence
  Description of Artificial Sequence: Synthetic epitope
TAESLKTKFN

SEQ ID NO: 49525 - protein, 10 aa, Artificial Sequence
  Description of Artificial Sequence: Synthetic epitope
TAESRTAQAA

SEQ ID NO: 49526 - protein, 10 aa, Artificial Sequence
  Description of Artificial Sequence: Synthetic epitope
TAESSQNMTA

SEQ ID NO: 49527 - protein, 10 aa, Artificial Sequence
  Description of Artificial Sequence: Synthetic epitope
TAESVNAGAN

SEQ ID NO: 49528 - protein, 10 aa, Artificial Sequence
  Description of Artificial Sequence: Synthetic epitope
TAETIARRSR

SEQ ID NO: 49529 - protein, 10 aa, Artificial Sequence
  Description of Artificial Sequence: Synthetic epitope
TAETIDSVPT

SEQ ID NO: 49530 - protein, 10 aa, Artificial Sequence
  Description of Artificial Sequence: Synthetic epitope
TAETLGVSGT

SEQ ID NO: 49531 - protein, 10 aa, Artificial Sequence
  Description of Artificial Sequence: Synthetic epitope
TAETSENAKL

SEQ ID NO: 49532 - protein, 10 aa, Artificial Sequence
  Description of Artificial Sequence: Synthetic epitope
TAEVAAPSTS

SEQ ID NO: 49533 - protein, 10 aa, Artificial Sequence
  Description of Artificial Sequence: Synthetic epitope
TAFAENRNSE

SEQ ID NO: 49534 - protein, 10 aa, Artificial Sequence
  Description of Artificial Sequence: Synthetic epitope
TAFATLASTS

SEQ ID NO: 49535 - protein, 10 aa, Artificial Sequence
  Description of Artificial Sequence: Synthetic epitope
TAFDSVLTSE

SEQ ID NO: 49536 - protein, 10 aa, Artificial Sequence
  Description of Artificial Sequence: Synthetic epitope
TAFEFGNAGA

SEQ ID NO: 49537 - protein, 10 aa, Artificial Sequence
  Description of Artificial Sequence: Synthetic epitope
TAFENMTKDW

SEQ ID NO: 49538 - protein, 10 aa, Artificial Sequence
  Description of Artificial Sequence: Synthetic epitope
TAFGETKTKT

SEQ ID NO: 49539 - protein, 10 aa, Artificial Sequence
  Description of Artificial Sequence: Synthetic epitope
TAFGNMDKFP

SEQ ID NO: 49540 - protein, 10 aa, Artificial Sequence
  Description of Artificial Sequence: Synthetic epitope
TAFTKNLVAT

SEQ ID NO: 49541 - protein, 10 aa, Artificial Sequence
  Description of Artificial Sequence: Synthetic epitope
TAGAAEHKSQ

SEQ ID NO: 49542 - protein, 10 aa, Artificial Sequence
  Description of Artificial Sequence: Synthetic epitope
TAGDQISQIK

SEQ ID NO: 49543 - protein, 10 aa, Artificial Sequence
  Description of Artificial Sequence: Synthetic epitope
TAGDQYYADS

SEQ ID NO: 49544 - protein, 10 aa, Artificial Sequence
  Description of Artificial Sequence: Synthetic epitope
TAGHFVQEED

SEQ ID NO: 49545 - protein, 10 aa, Artificial Sequence
  Description of Artificial Sequence: Synthetic epitope
TAGKETAPSL

SEQ ID NO: 49546 - protein, 10 aa, Artificial Sequence
  Description of Artificial Sequence: Synthetic epitope
TAGSSPNSVS

SEQ ID NO: 49547 - protein, 10 aa, Artificial Sequence
  Description of Artificial Sequence: Synthetic epitope
TAGTISGEET

SEQ ID NO: 49548 - protein, 10 aa, Artificial Sequence
  Description of Artificial Sequence: Synthetic epitope
TAGTVSSTTE

SEQ ID NO: 49549 - protein, 10 aa, Artificial Sequence
  Description of Artificial Sequence: Synthetic epitope
TAHKAARLGI

SEQ ID NO: 49550 - protein, 10 aa, Artificial Sequence
  Description of Artificial Sequence: Synthetic epitope
TAHLATTRNT

SEQ ID NO: 49551 - protein, 10 aa, Artificial Sequence
  Description of Artificial Sequence: Synthetic epitope
TAHSVQMAKA

SEQ ID NO: 49552 - protein, 10 aa, Artificial Sequence
  Description of Artificial Sequence: Synthetic epitope
TAHTNAMAPS

SEQ ID NO: 49553 - protein, 10 aa, Artificial Sequence
  Description of Artificial Sequence: Synthetic epitope
TAIEEIKEKM

SEQ ID NO: 49554 - protein, 10 aa, Artificial Sequence
  Description of Artificial Sequence: Synthetic epitope
TAIEHVKAAN

SEQ ID NO: 49555 - protein, 10 aa, Artificial Sequence
  Description of Artificial Sequence: Synthetic epitope
TAIESSVVTK

SEQ ID NO: 49556 - protein, 10 aa, Artificial Sequence
  Description of Artificial Sequence: Synthetic epitope
TAIEVVSSLP

SEQ ID NO: 49557 - protein, 10 aa, Artificial Sequence
  Description of Artificial Sequence: Synthetic epitope
TAIIKLLEEI

SEQ ID NO: 49558 - protein, 10 aa, Artificial Sequence
  Description of Artificial Sequence: Synthetic epitope
TAIKFPASQK

SEQ ID NO: 49559 - protein, 10 aa, Artificial Sequence
  Description of Artificial Sequence: Synthetic epitope
TAIKPETSDH

SEQ ID NO: 49560 - protein, 10 aa, Artificial Sequence
  Description of Artificial Sequence: Synthetic epitope
TAIKRIFNDS

SEQ ID NO: 49561 - protein, 10 aa, Artificial Sequence
  Description of Artificial Sequence: Synthetic epitope
TAIQAQVNTL

SEQ ID NO: 49562 - protein, 10 aa, Artificial Sequence
  Description of Artificial Sequence: Synthetic epitope
TAISKNKTKE

SEQ ID NO: 49563 - protein, 10 aa, Artificial Sequence
  Description of Artificial Sequence: Synthetic epitope
TAIVVLDKLI

SEQ ID NO: 49564 - protein, 10 aa, Artificial Sequence
  Description of Artificial Sequence: Synthetic epitope
TAKDSAKTTF

SEQ ID NO: 49565 - protein, 10 aa, Artificial Sequence
  Description of Artificial Sequence: Synthetic epitope
TAKESQYVMK

SEQ ID NO: 49566 - protein, 10 aa, Artificial Sequence
  Description of Artificial Sequence: Synthetic epitope
TAKETELQRE

SEQ ID NO: 49567 - protein, 10 aa, Artificial Sequence
  Description of Artificial Sequence: Synthetic epitope
TAKFIKEKST

SEQ ID NO: 49568 - protein, 10 aa, Artificial Sequence
  Description of Artificial Sequence: Synthetic epitope
TAKISSTAVT

SEQ ID NO: 49569 - protein, 10 aa, Artificial Sequence
  Description of Artificial Sequence: Synthetic epitope
TAKKDSLKAR

SEQ ID NO: 49570 - protein, 10 aa, Artificial Sequence
  Description of Artificial Sequence: Synthetic epitope
TAKKLEGIHD

SEQ ID NO: 49571 - protein, 10 aa, Artificial Sequence
  Description of Artificial Sequence: Synthetic epitope
TAKLDRFKGS

SEQ ID NO: 49572 - protein, 10 aa, Artificial Sequence
  Description of Artificial Sequence: Synthetic epitope
TAKLMIQGEE

SEQ ID NO: 49573 - protein, 10 aa, Artificial Sequence
  Description of Artificial Sequence: Synthetic epitope
TAKLVSKAHR

SEQ ID NO: 49574 - protein, 10 aa, Artificial Sequence
  Description of Artificial Sequence: Synthetic epitope
TAKMRKLSEN

SEQ ID NO: 49575 - protein, 10 aa, Artificial Sequence
  Description of Artificial Sequence: Synthetic epitope
TAKPVKSLTQ

SEQ ID NO: 49576 - protein, 10 aa, Artificial Sequence
  Description of Artificial Sequence: Synthetic epitope
TAKQSAESVS

SEQ ID NO: 49577 - protein, 10 aa, Artificial Sequence
  Description of Artificial Sequence: Synthetic epitope
TAKSLDLTQY

SEQ ID NO: 49578 - protein, 10 aa, Artificial Sequence
  Description of Artificial Sequence: Synthetic epitope
TAKTPTKRVR

SEQ ID NO: 49579 - protein, 10 aa, Artificial Sequence
  Description of Artificial Sequence: Synthetic epitope
TAKVENAARK

SEQ ID NO: 49580 - protein, 10 aa, Artificial Sequence
  Description of Artificial Sequence: Synthetic epitope
TAKVKQYREE

SEQ ID NO: 49581 - protein, 10 aa, Artificial Sequence
  Description of Artificial Sequence: Synthetic epitope
TALALAITDS

SEQ ID NO: 49582 - protein, 10 aa, Artificial Sequence
  Description of Artificial Sequence: Synthetic epitope
TALELIAFLA

SEQ ID NO: 49583 - protein, 10 aa, Artificial Sequence
  Description of Artificial Sequence: Synthetic epitope
TALETAYSST

SEQ ID NO: 49584 - protein, 10 aa, Artificial Sequence
  Description of Artificial Sequence: Synthetic epitope
TALHKTLETP

SEQ ID NO: 49585 - protein, 10 aa, Artificial Sequence
  Description of Artificial Sequence: Synthetic epitope
TALKQGKRVA

SEQ ID NO: 49586 - protein, 10 aa, Artificial Sequence
  Description of Artificial Sequence: Synthetic epitope
TALKSDLTDK

SEQ ID NO: 49587 - protein, 10 aa, Artificial Sequence
  Description of Artificial Sequence: Synthetic epitope
TALKSKGGAG

SEQ ID NO: 49588 - protein, 10 aa, Artificial Sequence
  Description of Artificial Sequence: Synthetic epitope
TALLKLLKYI

SEQ ID NO: 49589 - protein, 10 aa, Artificial Sequence
  Description of Artificial Sequence: Synthetic epitope
TALLQQANEN

SEQ ID NO: 49590 - protein, 10 aa, Artificial Sequence
  Description of Artificial Sequence: Synthetic epitope
TALLSEAERE

SEQ ID NO: 49591 - protein, 10 aa, Artificial Sequence
  Description of Artificial Sequence: Synthetic epitope
TALLSSVLQR

SEQ ID NO: 49592 - protein, 10 aa, Artificial Sequence
  Description of Artificial Sequence: Synthetic epitope
TALPDQYQED

SEQ ID NO: 49593 - protein, 10 aa, Artificial Sequence
  Description of Artificial Sequence: Synthetic epitope
TALPIEGVIL

SEQ ID NO: 49594 - protein, 10 aa, Artificial Sequence
  Description of Artificial Sequence: Synthetic epitope
TALQDSSKRK

SEQ ID NO: 49595 - protein, 10 aa, Artificial Sequence
  Description of Artificial Sequence: Synthetic epitope
TALQISNPAN

SEQ ID NO: 49596 - protein, 10 aa, Artificial Sequence
  Description of Artificial Sequence: Synthetic epitope
TALQRRETEV

SEQ ID NO: 49597 - protein, 10 aa, Artificial Sequence
  Description of Artificial Sequence: Synthetic epitope
TALRHQYTQT

SEQ ID NO: 49598 - protein, 10 aa, Artificial Sequence
  Description of Artificial Sequence: Synthetic epitope
TALRQSFSSA

SEQ ID NO: 49599 - protein, 10 aa, Artificial Sequence
  Description of Artificial Sequence: Synthetic epitope
TALSRLRASM

SEQ ID NO: 49600 - protein, 10 aa, Artificial Sequence
  Description of Artificial Sequence: Synthetic epitope
TALTNSTIEY

SEQ ID NO: 49601 - protein, 10 aa, Artificial Sequence
  Description of Artificial Sequence: Synthetic epitope
TALVEAIVEE

SEQ ID NO: 49602 - protein, 10 aa, Artificial Sequence
  Description of Artificial Sequence: Synthetic epitope
TALVGSVGLE

SEQ ID NO: 49603 - protein, 10 aa, Artificial Sequence
  Description of Artificial Sequence: Synthetic epitope
TAMDNASKNA

SEQ ID NO: 49604 - protein, 10 aa, Artificial Sequence
  Description of Artificial Sequence: Synthetic epitope
TAMDTLEVIS

SEQ ID NO: 49605 - protein, 10 aa, Artificial Sequence
  Description of Artificial Sequence: Synthetic epitope
TAMEGQSEQE

SEQ ID NO: 49606 - protein, 10 aa, Artificial Sequence
  Description of Artificial Sequence: Synthetic epitope
TAMLTRGEQH

SEQ ID NO: 49607 - protein, 10 aa, Artificial Sequence
  Description of Artificial Sequence: Synthetic epitope
TAMTLPSESR

SEQ ID NO: 49608 - protein, 10 aa, Artificial Sequence
  Description of Artificial Sequence: Synthetic epitope
TAMYKVLDVV

SEQ ID NO: 49609 - protein, 10 aa, Artificial Sequence
  Description of Artificial Sequence: Synthetic epitope
TANAATNSPS

SEQ ID NO: 49610 - protein, 10 aa, Artificial Sequence
  Description of Artificial Sequence: Synthetic epitope
TANEKSTMQE

SEQ ID NO: 49611 - protein, 10 aa, Artificial Sequence
  Description of Artificial Sequence: Synthetic epitope
TANEVVAVGG

SEQ ID NO: 49612 - protein, 10 aa, Artificial Sequence
  Description of Artificial Sequence: Synthetic epitope
TANISDVDPA

SEQ ID NO: 49613 - protein, 10 aa, Artificial Sequence
  Description of Artificial Sequence: Synthetic epitope
TANKATSSMV

SEQ ID NO: 49614 - protein, 10 aa, Artificial Sequence
  Description of Artificial Sequence: Synthetic epitope
TANKMKLTET

SEQ ID NO: 49615 - protein, 10 aa, Artificial Sequence
  Description of Artificial Sequence: Synthetic epitope
TANKVTRPEK

SEQ ID NO: 49616 - protein, 10 aa, Artificial Sequence
  Description of Artificial Sequence: Synthetic epitope
TANLQERSIS

SEQ ID NO: 49617 - protein, 10 aa, Artificial Sequence
  Description of Artificial Sequence: Synthetic epitope
TANLRTLENP

SEQ ID NO: 49618 - protein, 10 aa, Artificial Sequence
  Description of Artificial Sequence: Synthetic epitope
TANNDVSLSQ

SEQ ID NO: 49619 - protein, 10 aa, Artificial Sequence
  Description of Artificial Sequence: Synthetic epitope
TANPMEHANH

SEQ ID NO: 49620 - protein, 10 aa, Artificial Sequence
  Description of Artificial Sequence: Synthetic epitope
TANRLHEITN

SEQ ID NO: 49621 - protein, 10 aa, Artificial Sequence
  Description of Artificial Sequence: Synthetic epitope
TANRTQSLNY

SEQ ID NO: 49622 - protein, 10 aa, Artificial Sequence
  Description of Artificial Sequence: Synthetic epitope
TANSSMAYPS

SEQ ID NO: 49623 - protein, 10 aa, Artificial Sequence
  Description of Artificial Sequence: Synthetic epitope
TANSSRISNK

SEQ ID NO: 49624 - protein, 10 aa, Artificial Sequence
  Description of Artificial Sequence: Synthetic epitope
TANSVSQAVF

SEQ ID NO: 49625 - protein, 10 aa, Artificial Sequence
  Description of Artificial Sequence: Synthetic epitope
TANTDKATTE

SEQ ID NO: 49626 - protein, 10 aa, Artificial Sequence
  Description of Artificial Sequence: Synthetic epitope
TAPAEALKDG

SEQ ID NO: 49627 - protein, 10 aa, Artificial Sequence
  Description of Artificial Sequence: Synthetic epitope
TAPAKQAPSA

SEQ ID NO: 49628 - protein, 10 aa, Artificial Sequence
  Description of Artificial Sequence: Synthetic epitope
TAPASMLIGD

SEQ ID NO: 49629 - protein, 10 aa, Artificial Sequence
  Description of Artificial Sequence: Synthetic epitope
TAPINSKSDE

SEQ ID NO: 49630 - protein, 10 aa, Artificial Sequence
  Description of Artificial Sequence: Synthetic epitope
TAPLRAMFKD

SEQ ID NO: 49631 - protein, 10 aa, Artificial Sequence
  Description of Artificial Sequence: Synthetic epitope
TAPNQLGDQR

SEQ ID NO: 49632 - protein, 10 aa, Artificial Sequence
  Description of Artificial Sequence: Synthetic epitope
TAPQTEETGK

SEQ ID NO: 49633 - protein, 10 aa, Artificial Sequence
  Description of Artificial Sequence: Synthetic epitope
TAPSQVIRRQ

SEQ ID NO: 49634 - protein, 10 aa, Artificial Sequence
  Description of Artificial Sequence: Synthetic epitope
TAPTASKIVT

SEQ ID NO: 49635 - protein, 10 aa, Artificial Sequence
  Description of Artificial Sequence: Synthetic epitope
TAQAKSRDEE

SEQ ID NO: 49636 - protein, 10 aa, Artificial Sequence
  Description of Artificial Sequence: Synthetic epitope
TAQALVMFQT

SEQ ID NO: 49637 - protein, 10 aa, Artificial Sequence
  Description of Artificial Sequence: Synthetic epitope
TAQASLKTKP

SEQ ID NO: 49638 - protein, 10 aa, Artificial Sequence
  Description of Artificial Sequence: Synthetic epitope
TAQEAAVFLT

SEQ ID NO: 49639 - protein, 10 aa, Artificial Sequence
  Description of Artificial Sequence: Synthetic epitope
TAQETKQAPK

SEQ ID NO: 49640 - protein, 10 aa, Artificial Sequence
  Description of Artificial Sequence: Synthetic epitope
TAQGIGYIVN

SEQ ID NO: 49641 - protein, 10 aa, Artificial Sequence
  Description of Artificial Sequence: Synthetic epitope
TAQLIATLKN

SEQ ID NO: 49642 - protein, 10 aa, Artificial Sequence
  Description of Artificial Sequence: Synthetic epitope
TAQLIATLKN

SEQ ID NO: 49643 - protein, 10 aa, Artificial Sequence
  Description of Artificial Sequence: Synthetic epitope
TAQLSEQLER

SEQ ID NO: 49644 - protein, 10 aa, Artificial Sequence
  Description of Artificial Sequence: Synthetic epitope
TAQNALLEDD

SEQ ID NO: 49645 - protein, 10 aa, Artificial Sequence
  Description of Artificial Sequence: Synthetic epitope
TAQNKDLQWE

SEQ ID NO: 49646 - protein, 10 aa, Artificial Sequence
  Description of Artificial Sequence: Synthetic epitope
TAQQGVVNFP

SEQ ID NO: 49647 - protein, 10 aa, Artificial Sequence
  Description of Artificial Sequence: Synthetic epitope
TAQSKTMEVK

SEQ ID NO: 49648 - protein, 10 aa, Artificial Sequence
  Description of Artificial Sequence: Synthetic epitope
TAQVHHFMEL

SEQ ID NO: 49649 - protein, 10 aa, Artificial Sequence
  Description of Artificial Sequence: Synthetic epitope
TAQVTNQRVQ

SEQ ID NO: 49650 - protein, 10 aa, Artificial Sequence
  Description of Artificial Sequence: Synthetic epitope
TAQVVLELTH

SEQ ID NO: 49651 - protein, 10 aa, Artificial Sequence
  Description of Artificial Sequence: Synthetic epitope
TARAKRVREA

SEQ ID NO: 49652 - protein, 10 aa, Artificial Sequence
  Description of Artificial Sequence: Synthetic epitope
TARASPRQEK

SEQ ID NO: 49653 - protein, 10 aa, Artificial Sequence
  Description of Artificial Sequence: Synthetic epitope
TAREGASRKI

SEQ ID NO: 49654 - protein, 10 aa, Artificial Sequence
  Description of Artificial Sequence: Synthetic epitope
TARGHLLVEA

SEQ ID NO: 49655 - protein, 10 aa, Artificial Sequence
  Description of Artificial Sequence: Synthetic epitope
TARHKASAAP

SEQ ID NO: 49656 - protein, 10 aa, Artificial Sequence
  Description of Artificial Sequence: Synthetic epitope
TARIMELEDH

SEQ ID NO: 49657 - protein, 10 aa, Artificial Sequence
  Description of Artificial Sequence: Synthetic epitope
TARIPTKLEL

SEQ ID NO: 49658 - protein, 10 aa, Artificial Sequence
  Description of Artificial Sequence: Synthetic epitope
TARPAASQQD

SEQ ID NO: 49659 - protein, 10 aa, Artificial Sequence
  Description of Artificial Sequence: Synthetic epitope
TARRKVRLEP

SEQ ID NO: 49660 - protein, 10 aa, Artificial Sequence
  Description of Artificial Sequence: Synthetic epitope
TARSLRRSLT

SEQ ID NO: 49661 - protein, 10 aa, Artificial Sequence
  Description of Artificial Sequence: Synthetic epitope
TARTDIGDVQ

SEQ ID NO: 49662 - protein, 10 aa, Artificial Sequence
  Description of Artificial Sequence: Synthetic epitope
TARVQAIHQE

SEQ ID NO: 49663 - protein, 10 aa, Artificial Sequence
  Description of Artificial Sequence: Synthetic epitope
TARWELATPA

SEQ ID NO: 49664 - protein, 10 aa, Artificial Sequence
  Description of Artificial Sequence: Synthetic epitope
TASAAVPVST

SEQ ID NO: 49665 - protein, 10 aa, Artificial Sequence
  Description of Artificial Sequence: Synthetic epitope
TASAEAVFAS

SEQ ID NO: 49666 - protein, 10 aa, Artificial Sequence
  Description of Artificial Sequence: Synthetic epitope
TASAEAVFAS

SEQ ID NO: 49667 - protein, 10 aa, Artificial Sequence
  Description of Artificial Sequence: Synthetic epitope
TASAETLSTA

SEQ ID NO: 49668 - protein, 10 aa, Artificial Sequence
  Description of Artificial Sequence: Synthetic epitope
TASAHSVTED

SEQ ID NO: 49669 - protein, 10 aa, Artificial Sequence
  Description of Artificial Sequence: Synthetic epitope
TASASAKKII

SEQ ID NO: 49670 - protein, 10 aa, Artificial Sequence
  Description of Artificial Sequence: Synthetic epitope
TASATGSEGV

SEQ ID NO: 49671 - protein, 10 aa, Artificial Sequence
  Description of Artificial Sequence: Synthetic epitope
TASATVSISD

SEQ ID NO: 49672 - protein, 10 aa, Artificial Sequence
  Description of Artificial Sequence: Synthetic epitope
TASDKTDSAL

SEQ ID NO: 49673 - protein, 10 aa, Artificial Sequence
  Description of Artificial Sequence: Synthetic epitope
TASELATGLQ

SEQ ID NO: 49674 - protein, 10 aa, Artificial Sequence
  Description of Artificial Sequence: Synthetic epitope
TASEQLVVMY

SEQ ID NO: 49675 - protein, 10 aa, Artificial Sequence
  Description of Artificial Sequence: Synthetic epitope
TASETGEQLI

SEQ ID NO: 49676 - protein, 10 aa, Artificial Sequence
  Description of Artificial Sequence: Synthetic epitope
TASGELQVDA

SEQ ID NO: 49677 - protein, 10 aa, Artificial Sequence
  Description of Artificial Sequence: Synthetic epitope
TASKTGSLKR

SEQ ID NO: 49678 - protein, 10 aa, Artificial Sequence
  Description of Artificial Sequence: Synthetic epitope
TASLIKAMTY

SEQ ID NO: 49679 - protein, 10 aa, Artificial Sequence
  Description of Artificial Sequence: Synthetic epitope
TASLRAITEL

SEQ ID NO: 49680 - protein, 10 aa, Artificial Sequence
  Description of Artificial Sequence: Synthetic epitope
TASLTRASRT

SEQ ID NO: 49681 - protein, 10 aa, Artificial Sequence
  Description of Artificial Sequence: Synthetic epitope
TASLVSRQIQ

SEQ ID NO: 49682 - protein, 10 aa, Artificial Sequence
  Description of Artificial Sequence: Synthetic epitope
TASNTSLLSS

SEQ ID NO: 49683 - protein, 10 aa, Artificial Sequence
  Description of Artificial Sequence: Synthetic epitope
TASPASSADM

SEQ ID NO: 49684 - protein, 10 aa, Artificial Sequence
  Description of Artificial Sequence: Synthetic epitope
TASPASSKAK

SEQ ID NO: 49685 - protein, 10 aa, Artificial Sequence
  Description of Artificial Sequence: Synthetic epitope
TASQLSASNN

SEQ ID NO: 49686 - protein, 10 aa, Artificial Sequence
  Description of Artificial Sequence: Synthetic epitope
TASQSGSEIL

SEQ ID NO: 49687 - protein, 10 aa, Artificial Sequence
  Description of Artificial Sequence: Synthetic epitope
TASQSNLTKE

SEQ ID NO: 49688 - protein, 10 aa, Artificial Sequence
  Description of Artificial Sequence: Synthetic epitope
TASRSEEKDE

SEQ ID NO: 49689 - protein, 10 aa, Artificial Sequence
  Description of Artificial Sequence: Synthetic epitope
TASRVSKVND

SEQ ID NO: 49690 - protein, 10 aa, Artificial Sequence
  Description of Artificial Sequence: Synthetic epitope
TASSANLRHS

SEQ ID NO: 49691 - protein, 10 aa, Artificial Sequence
  Description of Artificial Sequence: Synthetic epitope
TASSATPTSE

SEQ ID NO: 49692 - protein, 10 aa, Artificial Sequence
  Description of Artificial Sequence: Synthetic epitope
TASSDSTPRA

SEQ ID NO: 49693 - protein, 10 aa, Artificial Sequence
  Description of Artificial Sequence: Synthetic epitope
TASSGLMAPR

SEQ ID NO: 49694 - protein, 10 aa, Artificial Sequence
  Description of Artificial Sequence: Synthetic epitope
TASSHDTSTT

SEQ ID NO: 49695 - protein, 10 aa, Artificial Sequence
  Description of Artificial Sequence: Synthetic epitope
TASSKSGDGK

SEQ ID NO: 49696 - protein, 10 aa, Artificial Sequence
  Description of Artificial Sequence: Synthetic epitope
TASSNKSLNL

SEQ ID NO: 49697 - protein, 10 aa, Artificial Sequence
  Description of Artificial Sequence: Synthetic epitope
TASSQRERES

SEQ ID NO: 49698 - protein, 10 aa, Artificial Sequence
  Description of Artificial Sequence: Synthetic epitope
TASSTADHSA

SEQ ID NO: 49699 - protein, 10 aa, Artificial Sequence
  Description of Artificial Sequence: Synthetic epitope
TASSTRATAG

SEQ ID NO: 49700 - protein, 10 aa, Artificial Sequence
  Description of Artificial Sequence: Synthetic epitope
TASTADVVKP

SEQ ID NO: 49701 - protein, 10 aa, Artificial Sequence
  Description of Artificial Sequence: Synthetic epitope
TASTASELEG

SEQ ID NO: 49702 - protein, 10 aa, Artificial Sequence
  Description of Artificial Sequence: Synthetic epitope
TASTGSTATP

SEQ ID NO: 49703 - protein, 10 aa, Artificial Sequence
  Description of Artificial Sequence: Synthetic epitope
TASTGSTATP

SEQ ID NO: 49704 - protein, 10 aa, Artificial Sequence
  Description of Artificial Sequence: Synthetic epitope
TASTGSTATP

SEQ ID NO: 49705 - protein, 10 aa, Artificial Sequence
  Description of Artificial Sequence: Synthetic epitope
TASTSFSQKS

SEQ ID NO: 49706 - protein, 10 aa, Artificial Sequence
  Description of Artificial Sequence: Synthetic epitope
TASTSQQPVR

SEQ ID NO: 49707 - protein, 10 aa, Artificial Sequence
  Description of Artificial Sequence: Synthetic epitope
TASTTANTPF

SEQ ID NO: 49708 - protein, 10 aa, Artificial Sequence
  Description of Artificial Sequence: Synthetic epitope
TASVARKRKS

SEQ ID NO: 49709 - protein, 10 aa, Artificial Sequence
  Description of Artificial Sequence: Synthetic epitope
TASVRPAQEE

SEQ ID NO: 49710 - protein, 10 aa, Artificial Sequence
  Description of Artificial Sequence: Synthetic epitope
TASYVRAQYQ

SEQ ID NO: 49711 - protein, 10 aa, Artificial Sequence
  Description of Artificial Sequence: Synthetic epitope
TATAAKEPDK

SEQ ID NO: 49712 - protein, 10 aa, Artificial Sequence
  Description of Artificial Sequence: Synthetic epitope
TATAERSSGV

SEQ ID NO: 49713 - protein, 10 aa, Artificial Sequence
  Description of Artificial Sequence: Synthetic epitope
TATAKSLGRR

SEQ ID NO: 49714 - protein, 10 aa, Artificial Sequence
  Description of Artificial Sequence: Synthetic epitope
TATALKTARE

SEQ ID NO: 49715 - protein, 10 aa, Artificial Sequence
  Description of Artificial Sequence: Synthetic epitope
TATATEEDVK

SEQ ID NO: 49716 - protein, 10 aa, Artificial Sequence
  Description of Artificial Sequence: Synthetic epitope
TATELTMLSA

SEQ ID NO: 49717 - protein, 10 aa, Artificial Sequence
  Description of Artificial Sequence: Synthetic epitope
TATELTTKSS

SEQ ID NO: 49718 - protein, 10 aa, Artificial Sequence
  Description of Artificial Sequence: Synthetic epitope
TATESSGAHS

SEQ ID NO: 49719 - protein, 10 aa, Artificial Sequence
  Description of Artificial Sequence: Synthetic epitope
TATETKALEE

SEQ ID NO: 49720 - protein, 10 aa, Artificial Sequence
  Description of Artificial Sequence: Synthetic epitope
TATEVAVETT

SEQ ID NO: 49721 - protein, 10 aa, Artificial Sequence
  Description of Artificial Sequence: Synthetic epitope
TATFAHADSA

SEQ ID NO: 49722 - protein, 10 aa, Artificial Sequence
  Description of Artificial Sequence: Synthetic epitope
TATHQQLEEA

SEQ ID NO: 49723 - protein, 10 aa, Artificial Sequence
  Description of Artificial Sequence: Synthetic epitope
TATIDVIYEM

SEQ ID NO: 49724 - protein, 10 aa, Artificial Sequence
  Description of Artificial Sequence: Synthetic epitope
TATITEIRDT

SEQ ID NO: 49725 - protein, 10 aa, Artificial Sequence
  Description of Artificial Sequence: Synthetic epitope
TATKPTVTQA

SEQ ID NO: 49726 - protein, 10 aa, Artificial Sequence
  Description of Artificial Sequence: Synthetic epitope
TATKRETAAT

SEQ ID NO: 49727 - protein, 10 aa, Artificial Sequence
  Description of Artificial Sequence: Synthetic epitope
TATKSTATSF

SEQ ID NO: 49728 - protein, 10 aa, Artificial Sequence
  Description of Artificial Sequence: Synthetic epitope
TATKVRRKIL

SEQ ID NO: 49729 - protein, 10 aa, Artificial Sequence
  Description of Artificial Sequence: Synthetic epitope
TATLKEKKDK

SEQ ID NO: 49730 - protein, 10 aa, Artificial Sequence
  Description of Artificial Sequence: Synthetic epitope
TATLSLKKER

SEQ ID NO: 49731 - protein, 10 aa, Artificial Sequence
  Description of Artificial Sequence: Synthetic epitope
TATMTRATNS

SEQ ID NO: 49732 - protein, 10 aa, Artificial Sequence
  Description of Artificial Sequence: Synthetic epitope
TATNSDSSTT

SEQ ID NO: 49733 - protein, 10 aa, Artificial Sequence
  Description of Artificial Sequence: Synthetic epitope
TATNSESSTT

SEQ ID NO: 49734 - protein, 10 aa, Artificial Sequence
  Description of Artificial Sequence: Synthetic epitope
TATPDQDRDK

SEQ ID NO: 49735 - protein, 10 aa, Artificial Sequence
  Description of Artificial Sequence: Synthetic epitope
TATPVLSITG

SEQ ID NO: 49736 - protein, 10 aa, Artificial Sequence
  Description of Artificial Sequence: Synthetic epitope
TATQRTAGED

SEQ ID NO: 49737 - protein, 10 aa, Artificial Sequence
  Description of Artificial Sequence: Synthetic epitope
TATQSSTATQ

SEQ ID NO: 49738 - protein, 10 aa, Artificial Sequence
  Description of Artificial Sequence: Synthetic epitope
TATQTKVVPQ

SEQ ID NO: 49739 - protein, 10 aa, Artificial Sequence
  Description of Artificial Sequence: Synthetic epitope
TATQTLMTMY

SEQ ID NO: 49740 - protein, 10 aa, Artificial Sequence
  Description of Artificial Sequence: Synthetic epitope
TATQVSANTM

SEQ ID NO: 49741 - protein, 10 aa, Artificial Sequence
  Description of Artificial Sequence: Synthetic epitope
TATSAMSKVE

SEQ ID NO: 49742 - protein, 10 aa, Artificial Sequence
  Description of Artificial Sequence: Synthetic epitope
TATSTDQLEA

SEQ ID NO: 49743 - protein, 10 aa, Artificial Sequence
  Description of Artificial Sequence: Synthetic epitope
TATTAQTEAA

SEQ ID NO: 49744 - protein, 10 aa, Artificial Sequence
  Description of Artificial Sequence: Synthetic epitope
TATTEYEAPA

SEQ ID NO: 49745 - protein, 10 aa, Artificial Sequence
  Description of Artificial Sequence: Synthetic epitope
TATTLETESS

SEQ ID NO: 49746 - protein, 10 aa, Artificial Sequence
  Description of Artificial Sequence: Synthetic epitope
TATTNIANTE

SEQ ID NO: 49747 - protein, 10 aa, Artificial Sequence
  Description of Artificial Sequence: Synthetic epitope
TATVAALQET

SEQ ID NO: 49748 - protein, 10 aa, Artificial Sequence
  Description of Artificial Sequence: Synthetic epitope
TATVTANNGQ

SEQ ID NO: 49749 - protein, 10 aa, Artificial Sequence
  Description of Artificial Sequence: Synthetic epitope
TAVAQLLPQP

SEQ ID NO: 49750 - protein, 10 aa, Artificial Sequence
  Description of Artificial Sequence: Synthetic epitope
TAVEKSKESQ

SEQ ID NO: 49751 - protein, 10 aa, Artificial Sequence
  Description of Artificial Sequence: Synthetic epitope
TAVESEFLSQ

SEQ ID NO: 49752 - protein, 10 aa, Artificial Sequence
  Description of Artificial Sequence: Synthetic epitope
TAVKEKAGAT

SEQ ID NO: 49753 - protein, 10 aa, Artificial Sequence
  Description of Artificial Sequence: Synthetic epitope
TAVLGAELSA

SEQ ID NO: 49754 - protein, 10 aa, Artificial Sequence
  Description of Artificial Sequence: Synthetic epitope
TAVLPVQIQL

SEQ ID NO: 49755 - protein, 10 aa, Artificial Sequence
  Description of Artificial Sequence: Synthetic epitope
TAVLQQRRAA

SEQ ID NO: 49756 - protein, 10 aa, Artificial Sequence
  Description of Artificial Sequence: Synthetic epitope
TAVNVTSASH

SEQ ID NO: 49757 - protein, 10 aa, Artificial Sequence
  Description of Artificial Sequence: Synthetic epitope
TAVQAAIRVG

SEQ ID NO: 49758 - protein, 10 aa, Artificial Sequence
  Description of Artificial Sequence: Synthetic epitope
TAVQARMQAS

SEQ ID NO: 49759 - protein, 10 aa, Artificial Sequence
  Description of Artificial Sequence: Synthetic epitope
TAVQLLFGQA

SEQ ID NO: 49760 - protein, 10 aa, Artificial Sequence
  Description of Artificial Sequence: Synthetic epitope
TAVQPLVAVL

SEQ ID NO: 49761 - protein, 10 aa, Artificial Sequence
  Description of Artificial Sequence: Synthetic epitope
TAVSAETGPE

SEQ ID NO: 49762 - protein, 10 aa, Artificial Sequence
  Description of Artificial Sequence: Synthetic epitope
TAVSAQQNSN

SEQ ID NO: 49763 - protein, 10 aa, Artificial Sequence
  Description of Artificial Sequence: Synthetic epitope
TAVSQLAQTA

SEQ ID NO: 49764 - protein, 10 aa, Artificial Sequence
  Description of Artificial Sequence: Synthetic epitope
TAVTEHDVNV

SEQ ID NO: 49765 - protein, 10 aa, Artificial Sequence
  Description of Artificial Sequence: Synthetic epitope
TAVTNSARLM

SEQ ID NO: 49766 - protein, 10 aa, Artificial Sequence
  Description of Artificial Sequence: Synthetic epitope
TAVTQLTVVP

SEQ ID NO: 49767 - protein, 10 aa, Artificial Sequence
  Description of Artificial Sequence: Synthetic epitope
TAVTTSSAKI

SEQ ID NO: 49768 - protein, 10 aa, Artificial Sequence
  Description of Artificial Sequence: Synthetic epitope
TAVTTVNDSN

SEQ ID NO: 49769 - protein, 10 aa, Artificial Sequence
  Description of Artificial Sequence: Synthetic epitope
TAVVEKVKSA

SEQ ID NO: 49770 - protein, 10 aa, Artificial Sequence
  Description of Artificial Sequence: Synthetic epitope
TAYAMTIPFV

SEQ ID NO: 49771 - protein, 10 aa, Artificial Sequence
  Description of Artificial Sequence: Synthetic epitope
TAYGYMRGFM

SEQ ID NO: 49772 - protein, 10 aa, Artificial Sequence
  Description of Artificial Sequence: Synthetic epitope
TAYILSVQAE

SEQ ID NO: 49773 - protein, 10 aa, Artificial Sequence
  Description of Artificial Sequence: Synthetic epitope
TAYKASTSDY

SEQ ID NO: 49774 - protein, 10 aa, Artificial Sequence
  Description of Artificial Sequence: Synthetic epitope
TAYKAVQEKS

SEQ ID NO: 49775 - protein, 10 aa, Artificial Sequence
  Description of Artificial Sequence: Synthetic epitope
TAYPQVADML

SEQ ID NO: 49776 - protein, 10 aa, Artificial Sequence
  Description of Artificial Sequence: Synthetic epitope
TDAARIGADA

SEQ ID NO: 49777 - protein, 10 aa, Artificial Sequence
  Description of Artificial Sequence: Synthetic epitope
TDAATSESKE

SEQ ID NO: 49778 - protein, 10 aa, Artificial Sequence
  Description of Artificial Sequence: Synthetic epitope
TDADDTQLHA

SEQ ID NO: 49779 - protein, 10 aa, Artificial Sequence
  Description of Artificial Sequence: Synthetic epitope
TDADKIEDEV

SEQ ID NO: 49780 - protein, 10 aa, Artificial Sequence
  Description of Artificial Sequence: Synthetic epitope
TDAEFVSDSS

SEQ ID NO: 49781 - protein, 10 aa, Artificial Sequence
  Description of Artificial Sequence: Synthetic epitope
TDAEQEKEQE

SEQ ID NO: 49782 - protein, 10 aa, Artificial Sequence
  Description of Artificial Sequence: Synthetic epitope
TDAETIVQAE

SEQ ID NO: 49783 - protein, 10 aa, Artificial Sequence
  Description of Artificial Sequence: Synthetic epitope
TDAETKPKSP

SEQ ID NO: 49784 - protein, 10 aa, Artificial Sequence
  Description of Artificial Sequence: Synthetic epitope
TDAFKKIGNA

SEQ ID NO: 49785 - protein, 10 aa, Artificial Sequence
  Description of Artificial Sequence: Synthetic epitope
TDAGDESATS

SEQ ID NO: 49786 - protein, 10 aa, Artificial Sequence
  Description of Artificial Sequence: Synthetic epitope
TDAGPTLDVA

SEQ ID NO: 49787 - protein, 10 aa, Artificial Sequence
  Description of Artificial Sequence: Synthetic epitope
TDAKLSNKEK

SEQ ID NO: 49788 - protein, 10 aa, Artificial Sequence
  Description of Artificial Sequence: Synthetic epitope
TDAKNGEERG

SEQ ID NO: 49789 - protein, 10 aa, Artificial Sequence
  Description of Artificial Sequence: Synthetic epitope
TDAPASSEQN

SEQ ID NO: 49790 - protein, 10 aa, Artificial Sequence
  Description of Artificial Sequence: Synthetic epitope
TDATMEKLAL

SEQ ID NO: 49791 - protein, 10 aa, Artificial Sequence
  Description of Artificial Sequence: Synthetic epitope
TDATSRERTH

SEQ ID NO: 49792 - protein, 10 aa, Artificial Sequence
  Description of Artificial Sequence: Synthetic epitope
TDDEVVQREE

SEQ ID NO: 49793 - protein, 10 aa, Artificial Sequence
  Description of Artificial Sequence: Synthetic epitope
TDDFGSSNAP

SEQ ID NO: 49794 - protein, 10 aa, Artificial Sequence
  Description of Artificial Sequence: Synthetic epitope
TDDKQVLNTQ

SEQ ID NO: 49795 - protein, 10 aa, Artificial Sequence
  Description of Artificial Sequence: Synthetic epitope
TDDLIKLSQA

SEQ ID NO: 49796 - protein, 10 aa, Artificial Sequence
  Description of Artificial Sequence: Synthetic epitope
TDDLKSSNSE

SEQ ID NO: 49797 - protein, 10 aa, Artificial Sequence
  Description of Artificial Sequence: Synthetic epitope
TDDLTIKLVI

SEQ ID NO: 49798 - protein, 10 aa, Artificial Sequence
  Description of Artificial Sequence: Synthetic epitope
TDDSKNAQAP

SEQ ID NO: 49799 - protein, 10 aa, Artificial Sequence
  Description of Artificial Sequence: Synthetic epitope
TDDTAQVTSD

SEQ ID NO: 49800 - protein, 10 aa, Artificial Sequence
  Description of Artificial Sequence: Synthetic epitope
TDDTVFRDSE

SEQ ID NO: 49801 - protein, 10 aa, Artificial Sequence
  Description of Artificial Sequence: Synthetic epitope
TDEKILANVT

SEQ ID NO: 49802 - protein, 10 aa, Artificial Sequence
  Description of Artificial Sequence: Synthetic epitope
TDEKKETVTQ

SEQ ID NO: 49803 - protein, 10 aa, Artificial Sequence
  Description of Artificial Sequence: Synthetic epitope
TDEMSANKIN

SEQ ID NO: 49804 - protein, 10 aa, Artificial Sequence
  Description of Artificial Sequence: Synthetic epitope
TDEPKVAKTW

SEQ ID NO: 49805 - protein, 10 aa, Artificial Sequence
  Description of Artificial Sequence: Synthetic epitope
TDEQHKVYQN

SEQ ID NO: 49806 - protein, 10 aa, Artificial Sequence
  Description of Artificial Sequence: Synthetic epitope
TDEQVALVRR

SEQ ID NO: 49807 - protein, 10 aa, Artificial Sequence
  Description of Artificial Sequence: Synthetic epitope
TDERKAQQLQ

SEQ ID NO: 49808 - protein, 10 aa, Artificial Sequence
  Description of Artificial Sequence: Synthetic epitope
TDESALKMDH

SEQ ID NO: 49809 - protein, 10 aa, Artificial Sequence
  Description of Artificial Sequence: Synthetic epitope
TDETFSLAEE

SEQ ID NO: 49810 - protein, 10 aa, Artificial Sequence
  Description of Artificial Sequence: Synthetic epitope
TDETLTSLLN

SEQ ID NO: 49811 - protein, 10 aa, Artificial Sequence
  Description of Artificial Sequence: Synthetic epitope
TDEVHHGTKN

SEQ ID NO: 49812 - protein, 10 aa, Artificial Sequence
  Description of Artificial Sequence: Synthetic epitope
TDEYSEADEE

SEQ ID NO: 49813 - protein, 10 aa, Artificial Sequence
  Description of Artificial Sequence: Synthetic epitope
TDFAENELDL

SEQ ID NO: 49814 - protein, 10 aa, Artificial Sequence
  Description of Artificial Sequence: Synthetic epitope
TDFEKVDLTQ

SEQ ID NO: 49815 - protein, 10 aa, Artificial Sequence
  Description of Artificial Sequence: Synthetic epitope
TDFKETLIAT

SEQ ID NO: 49816 - protein, 10 aa, Artificial Sequence
  Description of Artificial Sequence: Synthetic epitope
TDFQKAVYQT

SEQ ID NO: 49817 - protein, 10 aa, Artificial Sequence
  Description of Artificial Sequence: Synthetic epitope
TDFSKSTSNE

SEQ ID NO: 49818 - protein, 10 aa, Artificial Sequence
  Description of Artificial Sequence: Synthetic epitope
TDFSLLVNSQ

SEQ ID NO: 49819 - protein, 10 aa, Artificial Sequence
  Description of Artificial Sequence: Synthetic epitope
TDFSVRITGA

SEQ ID NO: 49820 - protein, 10 aa, Artificial Sequence
  Description of Artificial Sequence: Synthetic epitope
TDGAAQQAHT

SEQ ID NO: 49821 - protein, 10 aa, Artificial Sequence
  Description of Artificial Sequence: Synthetic epitope
TDGMIRKHSH

SEQ ID NO: 49822 - protein, 10 aa, Artificial Sequence
  Description of Artificial Sequence: Synthetic epitope
TDGMRVTSRK

SEQ ID NO: 49823 - protein, 10 aa, Artificial Sequence
  Description of Artificial Sequence: Synthetic epitope
TDGNETDSIW

SEQ ID NO: 49824 - protein, 10 aa, Artificial Sequence
  Description of Artificial Sequence: Synthetic epitope
TDGQATVYWS

SEQ ID NO: 49825 - protein, 10 aa, Artificial Sequence
  Description of Artificial Sequence: Synthetic epitope
TDGQLRSKRD

SEQ ID NO: 49826 - protein, 10 aa, Artificial Sequence
  Description of Artificial Sequence: Synthetic epitope
TDGQRNSVQQ

SEQ ID NO: 49827 - protein, 10 aa, Artificial Sequence
  Description of Artificial Sequence: Synthetic epitope
TDGTISEFRE

SEQ ID NO: 49828 - protein, 10 aa, Artificial Sequence
  Description of Artificial Sequence: Synthetic epitope
TDGVSLMRVL

SEQ ID NO: 49829 - protein, 10 aa, Artificial Sequence
  Description of Artificial Sequence: Synthetic epitope
TDHFMRLPKA

SEQ ID NO: 49830 - protein, 10 aa, Artificial Sequence
  Description of Artificial Sequence: Synthetic epitope
TDHITTGASS

SEQ ID NO: 49831 - protein, 10 aa, Artificial Sequence
  Description of Artificial Sequence: Synthetic epitope
TDIDSTLANF

SEQ ID NO: 49832 - protein, 10 aa, Artificial Sequence
  Description of Artificial Sequence: Synthetic epitope
TDIEQKVQRY

SEQ ID NO: 49833 - protein, 10 aa, Artificial Sequence
  Description of Artificial Sequence: Synthetic epitope
TDIESSNQAL

SEQ ID NO: 49834 - protein, 10 aa, Artificial Sequence
  Description of Artificial Sequence: Synthetic epitope
TDIGSIALNS

SEQ ID NO: 49835 - protein, 10 aa, Artificial Sequence
  Description of Artificial Sequence: Synthetic epitope
TDIIAAYQRF

SEQ ID NO: 49836 - protein, 10 aa, Artificial Sequence
  Description of Artificial Sequence: Synthetic epitope
TDIKKYHRIQ

SEQ ID NO: 49837 - protein, 10 aa, Artificial Sequence
  Description of Artificial Sequence: Synthetic epitope
TDIKNINAKH

SEQ ID NO: 49838 - protein, 10 aa, Artificial Sequence
  Description of Artificial Sequence: Synthetic epitope
TDILRTQKTN

SEQ ID NO: 49839 - protein, 10 aa, Artificial Sequence
  Description of Artificial Sequence: Synthetic epitope
TDIQETRRQP

SEQ ID NO: 49840 - protein, 10 aa, Artificial Sequence
  Description of Artificial Sequence: Synthetic epitope
TDISQSVSNG

SEQ ID NO: 49841 - protein, 10 aa, Artificial Sequence
  Description of Artificial Sequence: Synthetic epitope
TDISSAGSIS

SEQ ID NO: 49842 - protein, 10 aa, Artificial Sequence
  Description of Artificial Sequence: Synthetic epitope
TDITVSSVHT

SEQ ID NO: 49843 - protein, 10 aa, Artificial Sequence
  Description of Artificial Sequence: Synthetic epitope
TDIVSIARAA

SEQ ID NO: 49844 - protein, 10 aa, Artificial Sequence
  Description of Artificial Sequence: Synthetic epitope
TDIYKERSDD

SEQ ID NO: 49845 - protein, 10 aa, Artificial Sequence
  Description of Artificial Sequence: Synthetic epitope
TDKAVNHIWK

SEQ ID NO: 49846 - protein, 10 aa, Artificial Sequence
  Description of Artificial Sequence: Synthetic epitope
TDKEKAEKLK

SEQ ID NO: 49847 - protein, 10 aa, Artificial Sequence
  Description of Artificial Sequence: Synthetic epitope
TDKEQEFAAR

SEQ ID NO: 49848 - protein, 10 aa, Artificial Sequence
  Description of Artificial Sequence: Synthetic epitope
TDKIERIDLE

SEQ ID NO: 49849 - protein, 10 aa, Artificial Sequence
  Description of Artificial Sequence: Synthetic epitope
TDKKNSAKNP

SEQ ID NO: 49850 - protein, 10 aa, Artificial Sequence
  Description of Artificial Sequence: Synthetic epitope
TDKQKGLEEK

SEQ ID NO: 49851 - protein, 10 aa, Artificial Sequence
  Description of Artificial Sequence: Synthetic epitope
TDKTGVKSEG

SEQ ID NO: 49852 - protein, 10 aa, Artificial Sequence
  Description of Artificial Sequence: Synthetic epitope
TDKVLTANSN

SEQ ID NO: 49853 - protein, 10 aa, Artificial Sequence
  Description of Artificial Sequence: Synthetic epitope
TDLANKTHPS

SEQ ID NO: 49854 - protein, 10 aa, Artificial Sequence
  Description of Artificial Sequence: Synthetic epitope
TDLEDTKRDR

SEQ ID NO: 49855 - protein, 10 aa, Artificial Sequence
  Description of Artificial Sequence: Synthetic epitope
TDLEVIIKDN

SEQ ID NO: 49856 - protein, 10 aa, Artificial Sequence
  Description of Artificial Sequence: Synthetic epitope
TDLHNQLTQY

SEQ ID NO: 49857 - protein, 10 aa, Artificial Sequence
  Description of Artificial Sequence: Synthetic epitope
TDLISELSLL

SEQ ID NO: 49858 - protein, 10 aa, Artificial Sequence
  Description of Artificial Sequence: Synthetic epitope
TDLISELSLL

SEQ ID NO: 49859 - protein, 10 aa, Artificial Sequence
  Description of Artificial Sequence: Synthetic epitope
TDLKQQSTRE

SEQ ID NO: 49860 - protein, 10 aa, Artificial Sequence
  Description of Artificial Sequence: Synthetic epitope
TDLLKELVRF

SEQ ID NO: 49861 - protein, 10 aa, Artificial Sequence
  Description of Artificial Sequence: Synthetic epitope
TDLLKKSRKL

SEQ ID NO: 49862 - protein, 10 aa, Artificial Sequence
  Description of Artificial Sequence: Synthetic epitope
TDLPTVVTKN

SEQ ID NO: 49863 - protein, 10 aa, Artificial Sequence
  Description of Artificial Sequence: Synthetic epitope
TDLSVKTKDV

SEQ ID NO: 49864 - protein, 10 aa, Artificial Sequence
  Description of Artificial Sequence: Synthetic epitope
TDLTLKTQLE

SEQ ID NO: 49865 - protein, 10 aa, Artificial Sequence
  Description of Artificial Sequence: Synthetic epitope
TDMFHMVQSA

SEQ ID NO: 49866 - protein, 10 aa, Artificial Sequence
  Description of Artificial Sequence: Synthetic epitope
TDMKTTNLEE

SEQ ID NO: 49867 - protein, 10 aa, Artificial Sequence
  Description of Artificial Sequence: Synthetic epitope
TDMSADILSK

SEQ ID NO: 49868 - protein, 10 aa, Artificial Sequence
  Description of Artificial Sequence: Synthetic epitope
TDMTKDLKEE

SEQ ID NO: 49869 - protein, 10 aa, Artificial Sequence
  Description of Artificial Sequence: Synthetic epitope
TDNEKMTSTP

SEQ ID NO: 49870 - protein, 10 aa, Artificial Sequence
  Description of Artificial Sequence: Synthetic epitope
TDNGLQKVEM

SEQ ID NO: 49871 - protein, 10 aa, Artificial Sequence
  Description of Artificial Sequence: Synthetic epitope
TDNKKSVKND

SEQ ID NO: 49872 - protein, 10 aa, Artificial Sequence
  Description of Artificial Sequence: Synthetic epitope
TDNKQSLIEE

SEQ ID NO: 49873 - protein, 10 aa, Artificial Sequence
  Description of Artificial Sequence: Synthetic epitope
TDNLERSSPL

SEQ ID NO: 49874 - protein, 10 aa, Artificial Sequence
  Description of Artificial Sequence: Synthetic epitope
TDNLMRIFTM

SEQ ID NO: 49875 - protein, 10 aa, Artificial Sequence
  Description of Artificial Sequence: Synthetic epitope
TDNQSNAMKE

SEQ ID NO: 49876 - protein, 10 aa, Artificial Sequence
  Description of Artificial Sequence: Synthetic epitope
TDNSGVVQLD

SEQ ID NO: 49877 - protein, 10 aa, Artificial Sequence
  Description of Artificial Sequence: Synthetic epitope
TDNSHSEATR

SEQ ID NO: 49878 - protein, 10 aa, Artificial Sequence
  Description of Artificial Sequence: Synthetic epitope
TDNSSEINTT

SEQ ID NO: 49879 - protein, 10 aa, Artificial Sequence
  Description of Artificial Sequence: Synthetic epitope
TDNTSSKQDS

SEQ ID NO: 49880 - protein, 10 aa, Artificial Sequence
  Description of Artificial Sequence: Synthetic epitope
TDNVVQAKTD

SEQ ID NO: 49881 - protein, 10 aa, Artificial Sequence
  Description of Artificial Sequence: Synthetic epitope
TDPAAMLGPE

SEQ ID NO: 49882 - protein, 10 aa, Artificial Sequence
  Description of Artificial Sequence: Synthetic epitope
TDPEALALAD

SEQ ID NO: 49883 - protein, 10 aa, Artificial Sequence
  Description of Artificial Sequence: Synthetic epitope
TDPSLSKTDS

SEQ ID NO: 49884 - protein, 10 aa, Artificial Sequence
  Description of Artificial Sequence: Synthetic epitope
TDPVAASIMK

SEQ ID NO: 49885 - protein, 10 aa, Artificial Sequence
  Description of Artificial Sequence: Synthetic epitope
TDQARKEARK

SEQ ID NO: 49886 - protein, 10 aa, Artificial Sequence
  Description of Artificial Sequence: Synthetic epitope
TDQMTKSYTN

SEQ ID NO: 49887 - protein, 10 aa, Artificial Sequence
  Description of Artificial Sequence: Synthetic epitope
TDQPSTSQIA

SEQ ID NO: 49888 - protein, 10 aa, Artificial Sequence
  Description of Artificial Sequence: Synthetic epitope
TDQQTTDNPD

SEQ ID NO: 49889 - protein, 10 aa, Artificial Sequence
  Description of Artificial Sequence: Synthetic epitope
TDQSKWKAYD

SEQ ID NO: 49890 - protein, 10 aa, Artificial Sequence
  Description of Artificial Sequence: Synthetic epitope
TDRQKHVKIL

SEQ ID NO: 49891 - protein, 10 aa, Artificial Sequence
  Description of Artificial Sequence: Synthetic epitope
TDRTSMPSAN

SEQ ID NO: 49892 - protein, 10 aa, Artificial Sequence
  Description of Artificial Sequence: Synthetic epitope
TDSDSKTEEL

SEQ ID NO: 49893 - protein, 10 aa, Artificial Sequence
  Description of Artificial Sequence: Synthetic epitope
TDSEGESSKS

SEQ ID NO: 49894 - protein, 10 aa, Artificial Sequence
  Description of Artificial Sequence: Synthetic epitope
TDSEIALLEG

SEQ ID NO: 49895 - protein, 10 aa, Artificial Sequence
  Description of Artificial Sequence: Synthetic epitope
TDSEITGAQG

SEQ ID NO: 49896 - protein, 10 aa, Artificial Sequence
  Description of Artificial Sequence: Synthetic epitope
TDSESAEDQT

SEQ ID NO: 49897 - protein, 10 aa, Artificial Sequence
  Description of Artificial Sequence: Synthetic epitope
TDSHNTRTME

SEQ ID NO: 49898 - protein, 10 aa, Artificial Sequence
  Description of Artificial Sequence: Synthetic epitope
TDSKPITKSK

SEQ ID NO: 49899 - protein, 10 aa, Artificial Sequence
  Description of Artificial Sequence: Synthetic epitope
TDSKRTADPK

SEQ ID NO: 49900 - protein, 10 aa, Artificial Sequence
  Description of Artificial Sequence: Synthetic epitope
TDSKSLQLVL

SEQ ID NO: 49901 - protein, 10 aa, Artificial Sequence
  Description of Artificial Sequence: Synthetic epitope
TDSQESIQKI

SEQ ID NO: 49902 - protein, 10 aa, Artificial Sequence
  Description of Artificial Sequence: Synthetic epitope
TDSQMDDVEV

SEQ ID NO: 49903 - protein, 10 aa, Artificial Sequence
  Description of Artificial Sequence: Synthetic epitope
TDSQSEAVAI

SEQ ID NO: 49904 - protein, 10 aa, Artificial Sequence
  Description of Artificial Sequence: Synthetic epitope
TDSSAALTGG

SEQ ID NO: 49905 - protein, 10 aa, Artificial Sequence
  Description of Artificial Sequence: Synthetic epitope
TDSSEEALEG

SEQ ID NO: 49906 - protein, 10 aa, Artificial Sequence
  Description of Artificial Sequence: Synthetic epitope
TDSSLSSLFA

SEQ ID NO: 49907 - protein, 10 aa, Artificial Sequence
  Description of Artificial Sequence: Synthetic epitope
TDSSRIKRRK

SEQ ID NO: 49908 - protein, 10 aa, Artificial Sequence
  Description of Artificial Sequence: Synthetic epitope
TDSSTDSTLL

SEQ ID NO: 49909 - protein, 10 aa, Artificial Sequence
  Description of Artificial Sequence: Synthetic epitope
TDSSVSLLPH

SEQ ID NO: 49910 - protein, 10 aa, Artificial Sequence
  Description of Artificial Sequence: Synthetic epitope
TDSSYVEKKY

SEQ ID NO: 49911 - protein, 10 aa, Artificial Sequence
  Description of Artificial Sequence: Synthetic epitope
TDSTANKQLS

SEQ ID NO: 49912 - protein, 10 aa, Artificial Sequence
  Description of Artificial Sequence: Synthetic epitope
TDSTKSQHHS

SEQ ID NO: 49913 - protein, 10 aa, Artificial Sequence
  Description of Artificial Sequence: Synthetic epitope
TDSTSSATLS

SEQ ID NO: 49914 - protein, 10 aa, Artificial Sequence
  Description of Artificial Sequence: Synthetic epitope
TDTEGNVTAE

SEQ ID NO: 49915 - protein, 10 aa, Artificial Sequence
  Description of Artificial Sequence: Synthetic epitope
TDTMAPSADS

SEQ ID NO: 49916 - protein, 10 aa, Artificial Sequence
  Description of Artificial Sequence: Synthetic epitope
TDTNLFQKNS

SEQ ID NO: 49917 - protein, 10 aa, Artificial Sequence
  Description of Artificial Sequence: Synthetic epitope
TDTQNAQYSK

SEQ ID NO: 49918 - protein, 10 aa, Artificial Sequence
  Description of Artificial Sequence: Synthetic epitope
TDTSKYPKGY

SEQ ID NO: 49919 - protein, 10 aa, Artificial Sequence
  Description of Artificial Sequence: Synthetic epitope
TDTTSETNKR

SEQ ID NO: 49920 - protein, 10 aa, Artificial Sequence
  Description of Artificial Sequence: Synthetic epitope
TDTVANLSRG

SEQ ID NO: 49921 - protein, 10 aa, Artificial Sequence
  Description of Artificial Sequence: Synthetic epitope
TDTVANLSRG

SEQ ID NO: 49922 - protein, 10 aa, Artificial Sequence
  Description of Artificial Sequence: Synthetic epitope
TDTYQSLVNK

SEQ ID NO: 49923 - protein, 10 aa, Artificial Sequence
  Description of Artificial Sequence: Synthetic epitope
TDVAAQDGEA

SEQ ID NO: 49924 - protein, 10 aa, Artificial Sequence
  Description of Artificial Sequence: Synthetic epitope
TDVEASLKDI

SEQ ID NO: 49925 - protein, 10 aa, Artificial Sequence
  Description of Artificial Sequence: Synthetic epitope
TDVEKLQGKL

SEQ ID NO: 49926 - protein, 10 aa, Artificial Sequence
  Description of Artificial Sequence: Synthetic epitope
TDVEPAMQVI

SEQ ID NO: 49927 - protein, 10 aa, Artificial Sequence
  Description of Artificial Sequence: Synthetic epitope
TDVKSLIQRA

SEQ ID NO: 49928 - protein, 10 aa, Artificial Sequence
  Description of Artificial Sequence: Synthetic epitope
TDVKVTADMV

SEQ ID NO: 49929 - protein, 10 aa, Artificial Sequence
  Description of Artificial Sequence: Synthetic epitope
TDVLMPVPWP

SEQ ID NO: 49930 - protein, 10 aa, Artificial Sequence
  Description of Artificial Sequence: Synthetic epitope
TDVNYHTQST

SEQ ID NO: 49931 - protein, 10 aa, Artificial Sequence
  Description of Artificial Sequence: Synthetic epitope
TDVSISKTAL

SEQ ID NO: 49932 - protein, 10 aa, Artificial Sequence
  Description of Artificial Sequence: Synthetic epitope
TDVSQMLKQP

SEQ ID NO: 49933 - protein, 10 aa, Artificial Sequence
  Description of Artificial Sequence: Synthetic epitope
TDVSSAADSV

SEQ ID NO: 49934 - protein, 10 aa, Artificial Sequence
  Description of Artificial Sequence: Synthetic epitope
TDVSTRYKVS

SEQ ID NO: 49935 - protein, 10 aa, Artificial Sequence
  Description of Artificial Sequence: Synthetic epitope
TDVSTSSNIE

SEQ ID NO: 49936 - protein, 10 aa, Artificial Sequence
  Description of Artificial Sequence: Synthetic epitope
TDVVADADAR

SEQ ID NO: 49937 - protein, 10 aa, Artificial Sequence
  Description of Artificial Sequence: Synthetic epitope
TDVYVEQKLE

SEQ ID NO: 49938 - protein, 10 aa, Artificial Sequence
  Description of Artificial Sequence: Synthetic epitope
TDWQDKKGDR

SEQ ID NO: 49939 - protein, 10 aa, Artificial Sequence
  Description of Artificial Sequence: Synthetic epitope
TDYLTDSNKE

SEQ ID NO: 49940 - protein, 10 aa, Artificial Sequence
  Description of Artificial Sequence: Synthetic epitope
TDYQKSNFET

SEQ ID NO: 49941 - protein, 10 aa, Artificial Sequence
  Description of Artificial Sequence: Synthetic epitope
TDYQLVSPAK

SEQ ID NO: 49942 - protein, 10 aa, Artificial Sequence
  Description of Artificial Sequence: Synthetic epitope
TDYVEHAKEE

SEQ ID NO: 49943 - protein, 10 aa, Artificial Sequence
  Description of Artificial Sequence: Synthetic epitope
TEAALALSEQ

SEQ ID NO: 49944 - protein, 10 aa, Artificial Sequence
  Description of Artificial Sequence: Synthetic epitope
TEAAMKVRWN

SEQ ID NO: 49945 - protein, 10 aa, Artificial Sequence
  Description of Artificial Sequence: Synthetic epitope
TEAANVEKIT

SEQ ID NO: 49946 - protein, 10 aa, Artificial Sequence
  Description of Artificial Sequence: Synthetic epitope
TEAAQIISAA

SEQ ID NO: 49947 - protein, 10 aa, Artificial Sequence
  Description of Artificial Sequence: Synthetic epitope
TEAASLSTGS

SEQ ID NO: 49948 - protein, 10 aa, Artificial Sequence
  Description of Artificial Sequence: Synthetic epitope
TEADKEIELQ

SEQ ID NO: 49949 - protein, 10 aa, Artificial Sequence
  Description of Artificial Sequence: Synthetic epitope
TEAEASSQSL

SEQ ID NO: 49950 - protein, 10 aa, Artificial Sequence
  Description of Artificial Sequence: Synthetic epitope
TEAEKSTKTR

SEQ ID NO: 49951 - protein, 10 aa, Artificial Sequence
  Description of Artificial Sequence: Synthetic epitope
TEAESNSNMR

SEQ ID NO: 49952 - protein, 10 aa, Artificial Sequence
  Description of Artificial Sequence: Synthetic epitope
TEAETKVLQA

SEQ ID NO: 49953 - protein, 10 aa, Artificial Sequence
  Description of Artificial Sequence: Synthetic epitope
TEAHKQRMAL

SEQ ID NO: 49954 - protein, 10 aa, Artificial Sequence
  Description of Artificial Sequence: Synthetic epitope
TEAIAGVADG

SEQ ID NO: 49955 - protein, 10 aa, Artificial Sequence
  Description of Artificial Sequence: Synthetic epitope
TEAIAGVADG

SEQ ID NO: 49956 - protein, 10 aa, Artificial Sequence
  Description of Artificial Sequence: Synthetic epitope
TEAIAGVADG

SEQ ID NO: 49957 - protein, 10 aa, Artificial Sequence
  Description of Artificial Sequence: Synthetic epitope
TEAIAGVADG

SEQ ID NO: 49958 - protein, 10 aa, Artificial Sequence
  Description of Artificial Sequence: Synthetic epitope
TEAIAGVADG

SEQ ID NO: 49959 - protein, 10 aa, Artificial Sequence
  Description of Artificial Sequence: Synthetic epitope
TEAIAGVADG

SEQ ID NO: 49960 - protein, 10 aa, Artificial Sequence
  Description of Artificial Sequence: Synthetic epitope
TEAIAGVADG

SEQ ID NO: 49961 - protein, 10 aa, Artificial Sequence
  Description of Artificial Sequence: Synthetic epitope
TEAIAGVADG

SEQ ID NO: 49962 - protein, 10 aa, Artificial Sequence
  Description of Artificial Sequence: Synthetic epitope
TEAIAGVADG

SEQ ID NO: 49963 - protein, 10 aa, Artificial Sequence
  Description of Artificial Sequence: Synthetic epitope
TEAISDAETS

SEQ ID NO: 49964 - protein, 10 aa, Artificial Sequence
  Description of Artificial Sequence: Synthetic epitope
TEAKEASGET

SEQ ID NO: 49965 - protein, 10 aa, Artificial Sequence
  Description of Artificial Sequence: Synthetic epitope
TEAKGESSEK

SEQ ID NO: 49966 - protein, 10 aa, Artificial Sequence
  Description of Artificial Sequence: Synthetic epitope
TEAKIQSTVT

SEQ ID NO: 49967 - protein, 10 aa, Artificial Sequence
  Description of Artificial Sequence: Synthetic epitope
TEAKLIVFLT

SEQ ID NO: 49968 - protein, 10 aa, Artificial Sequence
  Description of Artificial Sequence: Synthetic epitope
TEAKPVDKVK

SEQ ID NO: 49969 - protein, 10 aa, Artificial Sequence
  Description of Artificial Sequence: Synthetic epitope
TEALAQSSAS

SEQ ID NO: 49970 - protein, 10 aa, Artificial Sequence
  Description of Artificial Sequence: Synthetic epitope
TEALEALQSE

SEQ ID NO: 49971 - protein, 10 aa, Artificial Sequence
  Description of Artificial Sequence: Synthetic epitope
TEALEQSKKT

SEQ ID NO: 49972 - protein, 10 aa, Artificial Sequence
  Description of Artificial Sequence: Synthetic epitope
TEALLTLTEN

SEQ ID NO: 49973 - protein, 10 aa, Artificial Sequence
  Description of Artificial Sequence: Synthetic epitope
TEALSQAREQ

SEQ ID NO: 49974 - protein, 10 aa, Artificial Sequence
  Description of Artificial Sequence: Synthetic epitope
TEAMSDYKKQ

SEQ ID NO: 49975 - protein, 10 aa, Artificial Sequence
  Description of Artificial Sequence: Synthetic epitope
TEANKEFMEQ

SEQ ID NO: 49976 - protein, 10 aa, Artificial Sequence
  Description of Artificial Sequence: Synthetic epitope
TEANLSAEVS

SEQ ID NO: 49977 - protein, 10 aa, Artificial Sequence
  Description of Artificial Sequence: Synthetic epitope
TEANVQYAAV

SEQ ID NO: 49978 - protein, 10 aa, Artificial Sequence
  Description of Artificial Sequence: Synthetic epitope
TEAQAATRLM

SEQ ID NO: 49979 - protein, 10 aa, Artificial Sequence
  Description of Artificial Sequence: Synthetic epitope
TEAQLNAVDA

SEQ ID NO: 49980 - protein, 10 aa, Artificial Sequence
  Description of Artificial Sequence: Synthetic epitope
TEAQRALDEF

SEQ ID NO: 49981 - protein, 10 aa, Artificial Sequence
  Description of Artificial Sequence: Synthetic epitope
TEAQSQVKIR

SEQ ID NO: 49982 - protein, 10 aa, Artificial Sequence
  Description of Artificial Sequence: Synthetic epitope
TEARKQEKGK

SEQ ID NO: 49983 - protein, 10 aa, Artificial Sequence
  Description of Artificial Sequence: Synthetic epitope
TEARLAKGAQ

SEQ ID NO: 49984 - protein, 10 aa, Artificial Sequence
  Description of Artificial Sequence: Synthetic epitope
TEARLRTQEM

SEQ ID NO: 49985 - protein, 10 aa, Artificial Sequence
  Description of Artificial Sequence: Synthetic epitope
TEASEQQALH

SEQ ID NO: 49986 - protein, 10 aa, Artificial Sequence
  Description of Artificial Sequence: Synthetic epitope
TEASESGLEI

SEQ ID NO: 49987 - protein, 10 aa, Artificial Sequence
  Description of Artificial Sequence: Synthetic epitope
TEASIEARVQ

SEQ ID NO: 49988 - protein, 10 aa, Artificial Sequence
  Description of Artificial Sequence: Synthetic epitope
TEASMAIRPK

SEQ ID NO: 49989 - protein, 10 aa, Artificial Sequence
  Description of Artificial Sequence: Synthetic epitope
TEASSATSKA

SEQ ID NO: 49990 - protein, 10 aa, Artificial Sequence
  Description of Artificial Sequence: Synthetic epitope
TEASSDIDIA

SEQ ID NO: 49991 - protein, 10 aa, Artificial Sequence
  Description of Artificial Sequence: Synthetic epitope
TEATTSNSSL

SEQ ID NO: 49992 - protein, 10 aa, Artificial Sequence
  Description of Artificial Sequence: Synthetic epitope
TEAVALVLEE

SEQ ID NO: 49993 - protein, 10 aa, Artificial Sequence
  Description of Artificial Sequence: Synthetic epitope
TEAVHTMLSS

SEQ ID NO: 49994 - protein, 10 aa, Artificial Sequence
  Description of Artificial Sequence: Synthetic epitope
TEAVSEAGGD

SEQ ID NO: 49995 - protein, 10 aa, Artificial Sequence
  Description of Artificial Sequence: Synthetic epitope
TEAVVESSRK

SEQ ID NO: 49996 - protein, 10 aa, Artificial Sequence
  Description of Artificial Sequence: Synthetic epitope
TEDASKTRKQ

SEQ ID NO: 49997 - protein, 10 aa, Artificial Sequence
  Description of Artificial Sequence: Synthetic epitope
TEDESLEGIQ

SEQ ID NO: 49998 - protein, 10 aa, Artificial Sequence
  Description of Artificial Sequence: Synthetic epitope
TEDESLSTMS

SEQ ID NO: 49999 - protein, 10 aa, Artificial Sequence
  Description of Artificial Sequence: Synthetic epitope
TEDGQASQSR

SEQ ID NO: 50000 - protein, 10 aa, Artificial Sequence
  Description of Artificial Sequence: Synthetic epitope
TEDIVTVVTM

SEQ ID NO: 50001 - protein, 10 aa, Artificial Sequence
  Description of Artificial Sequence: Synthetic epitope
TEDNKFFPIQ

SEQ ID NO: 50002 - protein, 10 aa, Artificial Sequence
  Description of Artificial Sequence: Synthetic epitope
TEDSETSTES

SEQ ID NO: 50003 - protein, 10 aa, Artificial Sequence
  Description of Artificial Sequence: Synthetic epitope
TEDSQLGQNQ

SEQ ID NO: 50004 - protein, 10 aa, Artificial Sequence
  Description of Artificial Sequence: Synthetic epitope
TEDTETVGQR

SEQ ID NO: 50005 - protein, 10 aa, Artificial Sequence
  Description of Artificial Sequence: Synthetic epitope
TEDTRDQNQQ

SEQ ID NO: 50006 - protein, 10 aa, Artificial Sequence
  Description of Artificial Sequence: Synthetic epitope
TEEAALNVTL

SEQ ID NO: 50007 - protein, 10 aa, Artificial Sequence
  Description of Artificial Sequence: Synthetic epitope
TEEAITLRKK

SEQ ID NO: 50008 - protein, 10 aa, Artificial Sequence
  Description of Artificial Sequence: Synthetic epitope
TEEAQALAIQ

SEQ ID NO: 50009 - protein, 10 aa, Artificial Sequence
  Description of Artificial Sequence: Synthetic epitope
TEEGSSKEDY

SEQ ID NO: 50010 - protein, 10 aa, Artificial Sequence
  Description of Artificial Sequence: Synthetic epitope
TEEGTAKEAT

SEQ ID NO: 50011 - protein, 10 aa, Artificial Sequence
  Description of Artificial Sequence: Synthetic epitope
TEEGTEVHVE

SEQ ID NO: 50012 - protein, 10 aa, Artificial Sequence
  Description of Artificial Sequence: Synthetic epitope
TEEIRTMQSK

SEQ ID NO: 50013 - protein, 10 aa, Artificial Sequence
  Description of Artificial Sequence: Synthetic epitope
TEEKAALPEA

SEQ ID NO: 50014 - protein, 10 aa, Artificial Sequence
  Description of Artificial Sequence: Synthetic epitope
TEEKAVTTVL

SEQ ID NO: 50015 - protein, 10 aa, Artificial Sequence
  Description of Artificial Sequence: Synthetic epitope
TEEKKVSMGK

SEQ ID NO: 50016 - protein, 10 aa, Artificial Sequence
  Description of Artificial Sequence: Synthetic epitope
TEEKSPRKEE

SEQ ID NO: 50017 - protein, 10 aa, Artificial Sequence
  Description of Artificial Sequence: Synthetic epitope
TEELDGGTTE

SEQ ID NO: 50018 - protein, 10 aa, Artificial Sequence
  Description of Artificial Sequence: Synthetic epitope
TEELVVNKQQ

SEQ ID NO: 50019 - protein, 10 aa, Artificial Sequence
  Description of Artificial Sequence: Synthetic epitope
TEEMEALLPQ

SEQ ID NO: 50020 - protein, 10 aa, Artificial Sequence
  Description of Artificial Sequence: Synthetic epitope
TEENSATESK

SEQ ID NO: 50021 - protein, 10 aa, Artificial Sequence
  Description of Artificial Sequence: Synthetic epitope
TEENVKHNEA

SEQ ID NO: 50022 - protein, 10 aa, Artificial Sequence
  Description of Artificial Sequence: Synthetic epitope
TEEPIMILLN

SEQ ID NO: 50023 - protein, 10 aa, Artificial Sequence
  Description of Artificial Sequence: Synthetic epitope
TEEPTKLMHN

SEQ ID NO: 50024 - protein, 10 aa, Artificial Sequence
  Description of Artificial Sequence: Synthetic epitope
TEEQLASAME

SEQ ID NO: 50025 - protein, 10 aa, Artificial Sequence
  Description of Artificial Sequence: Synthetic epitope
TEEQSQESEM

SEQ ID NO: 50026 - protein, 10 aa, Artificial Sequence
  Description of Artificial Sequence: Synthetic epitope
TEEQVQASTP

SEQ ID NO: 50027 - protein, 10 aa, Artificial Sequence
  Description of Artificial Sequence: Synthetic epitope
TEESATASPE

SEQ ID NO: 50028 - protein, 10 aa, Artificial Sequence
  Description of Artificial Sequence: Synthetic epitope
TEESELSAPT

SEQ ID NO: 50029 - protein, 10 aa, Artificial Sequence
  Description of Artificial Sequence: Synthetic epitope
TEESKADSPP

SEQ ID NO: 50030 - protein, 10 aa, Artificial Sequence
  Description of Artificial Sequence: Synthetic epitope
TEESLTSDAA

SEQ ID NO: 50031 - protein, 10 aa, Artificial Sequence
  Description of Artificial Sequence: Synthetic epitope
TEESRSETAS

SEQ ID NO: 50032 - protein, 10 aa, Artificial Sequence
  Description of Artificial Sequence: Synthetic epitope
TEESVRYKQS

SEQ ID NO: 50033 - protein, 10 aa, Artificial Sequence
  Description of Artificial Sequence: Synthetic epitope
TEETIKINQK

SEQ ID NO: 50034 - protein, 10 aa, Artificial Sequence
  Description of Artificial Sequence: Synthetic epitope
TEETKRIQAS

SEQ ID NO: 50035 - protein, 10 aa, Artificial Sequence
  Description of Artificial Sequence: Synthetic epitope
TEETLNQSTE

SEQ ID NO: 50036 - protein, 10 aa, Artificial Sequence
  Description of Artificial Sequence: Synthetic epitope
TEETLTKVSA

SEQ ID NO: 50037 - protein, 10 aa, Artificial Sequence
  Description of Artificial Sequence: Synthetic epitope
TEETRSESEL

SEQ ID NO: 50038 - protein, 10 aa, Artificial Sequence
  Description of Artificial Sequence: Synthetic epitope
TEETSTQEQS

SEQ ID NO: 50039 - protein, 10 aa, Artificial Sequence
  Description of Artificial Sequence: Synthetic epitope
TEETVSPKIK

SEQ ID NO: 50040 - protein, 10 aa, Artificial Sequence
  Description of Artificial Sequence: Synthetic epitope
TEEVGSSLEQ

SEQ ID NO: 50041 - protein, 10 aa, Artificial Sequence
  Description of Artificial Sequence: Synthetic epitope
TEEVVTAESV

SEQ ID NO: 50042 - protein, 10 aa, Artificial Sequence
  Description of Artificial Sequence: Synthetic epitope
TEFETHAPDQ

SEQ ID NO: 50043 - protein, 10 aa, Artificial Sequence
  Description of Artificial Sequence: Synthetic epitope
TEFGEELAGE

SEQ ID NO: 50044 - protein, 10 aa, Artificial Sequence
  Description of Artificial Sequence: Synthetic epitope
TEFLLESEED

SEQ ID NO: 50045 - protein, 10 aa, Artificial Sequence
  Description of Artificial Sequence: Synthetic epitope
TEFPATEAWE

SEQ ID NO: 50046 - protein, 10 aa, Artificial Sequence
  Description of Artificial Sequence: Synthetic epitope
TEFPELAPSQ

SEQ ID NO: 50047 - protein, 10 aa, Artificial Sequence
  Description of Artificial Sequence: Synthetic epitope
TEFQVSLQDL

SEQ ID NO: 50048 - protein, 10 aa, Artificial Sequence
  Description of Artificial Sequence: Synthetic epitope
TEFSVIIKKQ

SEQ ID NO: 50049 - protein, 10 aa, Artificial Sequence
  Description of Artificial Sequence: Synthetic epitope
TEFTIEDFHN

SEQ ID NO: 50050 - protein, 10 aa, Artificial Sequence
  Description of Artificial Sequence: Synthetic epitope
TEFYVAYSSN

SEQ ID NO: 50051 - protein, 10 aa, Artificial Sequence
  Description of Artificial Sequence: Synthetic epitope
TEGAEATPGA

SEQ ID NO: 50052 - protein, 10 aa, Artificial Sequence
  Description of Artificial Sequence: Synthetic epitope
TEGHLTMRQG

SEQ ID NO: 50053 - protein, 10 aa, Artificial Sequence
  Description of Artificial Sequence: Synthetic epitope
TEGRAERLEA

SEQ ID NO: 50054 - protein, 10 aa, Artificial Sequence
  Description of Artificial Sequence: Synthetic epitope
TEGRRSKTNK

SEQ ID NO: 50055 - protein, 10 aa, Artificial Sequence
  Description of Artificial Sequence: Synthetic epitope
TEHAFQLIQK

SEQ ID NO: 50056 - protein, 10 aa, Artificial Sequence
  Description of Artificial Sequence: Synthetic epitope
TEHATESEER

SEQ ID NO: 50057 - protein, 10 aa, Artificial Sequence
  Description of Artificial Sequence: Synthetic epitope
TEHDRLSTEM

SEQ ID NO: 50058 - protein, 10 aa, Artificial Sequence
  Description of Artificial Sequence: Synthetic epitope
TEHEMAKSEI

SEQ ID NO: 50059 - protein, 10 aa, Artificial Sequence
  Description of Artificial Sequence: Synthetic epitope
TEHESDIASL

SEQ ID NO: 50060 - protein, 10 aa, Artificial Sequence
  Description of Artificial Sequence: Synthetic epitope
TEHGGKDVYP

SEQ ID NO: 50061 - protein, 10 aa, Artificial Sequence
  Description of Artificial Sequence: Synthetic epitope
TEHQSRTSEE

SEQ ID NO: 50062 - protein, 10 aa, Artificial Sequence
  Description of Artificial Sequence: Synthetic epitope
TEHTEVREIK

SEQ ID NO: 50063 - protein, 10 aa, Artificial Sequence
  Description of Artificial Sequence: Synthetic epitope
TEHTQSQAAW

SEQ ID NO: 50064 - protein, 10 aa, Artificial Sequence
  Description of Artificial Sequence: Synthetic epitope
TEIAGKSKEN

SEQ ID NO: 50065 - protein, 10 aa, Artificial Sequence
  Description of Artificial Sequence: Synthetic epitope
TEIDLVLKSE

SEQ ID NO: 50066 - protein, 10 aa, Artificial Sequence
  Description of Artificial Sequence: Synthetic epitope
TEIEIIAPHK

SEQ ID NO: 50067 - protein, 10 aa, Artificial Sequence
  Description of Artificial Sequence: Synthetic epitope
TEIERTTGRS

SEQ ID NO: 50068 - protein, 10 aa, Artificial Sequence
  Description of Artificial Sequence: Synthetic epitope
TEIESISQGV

SEQ ID NO: 50069 - protein, 10 aa, Artificial Sequence
  Description of Artificial Sequence: Synthetic epitope
TEIGIRSGWK

SEQ ID NO: 50070 - protein, 10 aa, Artificial Sequence
  Description of Artificial Sequence: Synthetic epitope
TEILAPKAEK

SEQ ID NO: 50071 - protein, 10 aa, Artificial Sequence
  Description of Artificial Sequence: Synthetic epitope
TEILTKRMTN

SEQ ID NO: 50072 - protein, 10 aa, Artificial Sequence
  Description of Artificial Sequence: Synthetic epitope
TEINEALAEN

SEQ ID NO: 50073 - protein, 10 aa, Artificial Sequence
  Description of Artificial Sequence: Synthetic epitope
TEINLVINPK

SEQ ID NO: 50074 - protein, 10 aa, Artificial Sequence
  Description of Artificial Sequence: Synthetic epitope
TEINRVMVTQ

SEQ ID NO: 50075 - protein, 10 aa, Artificial Sequence
  Description of Artificial Sequence: Synthetic epitope
TEIRDKATRR

SEQ ID NO: 50076 - protein, 10 aa, Artificial Sequence
  Description of Artificial Sequence: Synthetic epitope
TEIRNSEEDQ

SEQ ID NO: 50077 - protein, 10 aa, Artificial Sequence
  Description of Artificial Sequence: Synthetic epitope
TEITHTISGD

SEQ ID NO: 50078 - protein, 10 aa, Artificial Sequence
  Description of Artificial Sequence: Synthetic epitope
TEIVKQQDPL

SEQ ID NO: 50079 - protein, 10 aa, Artificial Sequence
  Description of Artificial Sequence: Synthetic epitope
TEIYRIVSQK

SEQ ID NO: 50080 - protein, 10 aa, Artificial Sequence
  Description of Artificial Sequence: Synthetic epitope
TEKAGSIEDT

SEQ ID NO: 50081 - protein, 10 aa, Artificial Sequence
  Description of Artificial Sequence: Synthetic epitope
TEKAKIMSMK

SEQ ID NO: 50082 - protein, 10 aa, Artificial Sequence
  Description of Artificial Sequence: Synthetic epitope
TEKASVNAEL

SEQ ID NO: 50083 - protein, 10 aa, Artificial Sequence
  Description of Artificial Sequence: Synthetic epitope
TEKAVAARDK

SEQ ID NO: 50084 - protein, 10 aa, Artificial Sequence
  Description of Artificial Sequence: Synthetic epitope
TEKEASARRE

SEQ ID NO: 50085 - protein, 10 aa, Artificial Sequence
  Description of Artificial Sequence: Synthetic epitope
TEKEENKRQE

SEQ ID NO: 50086 - protein, 10 aa, Artificial Sequence
  Description of Artificial Sequence: Synthetic epitope
TEKEKILRKE

SEQ ID NO: 50087 - protein, 10 aa, Artificial Sequence
  Description of Artificial Sequence: Synthetic epitope
TEKEKRALTQ

SEQ ID NO: 50088 - protein, 10 aa, Artificial Sequence
  Description of Artificial Sequence: Synthetic epitope
TEKEVARQQL

SEQ ID NO: 50089 - protein, 10 aa, Artificial Sequence
  Description of Artificial Sequence: Synthetic epitope
TEKEYKTYKE

SEQ ID NO: 50090 - protein, 10 aa, Artificial Sequence
  Description of Artificial Sequence: Synthetic epitope
TEKGAEQLRG

SEQ ID NO: 50091 - protein, 10 aa, Artificial Sequence
  Description of Artificial Sequence: Synthetic epitope
TEKGAEQLRG

SEQ ID NO: 50092 - protein, 10 aa, Artificial Sequence
  Description of Artificial Sequence: Synthetic epitope
TEKGKKTTVE

SEQ ID NO: 50093 - protein, 10 aa, Artificial Sequence
  Description of Artificial Sequence: Synthetic epitope
TEKIQNAEVR

SEQ ID NO: 50094 - protein, 10 aa, Artificial Sequence
  Description of Artificial Sequence: Synthetic epitope
TEKKAIKRFQ

SEQ ID NO: 50095 - protein, 10 aa, Artificial Sequence
  Description of Artificial Sequence: Synthetic epitope
TEKKQNIQEH

SEQ ID NO: 50096 - protein, 10 aa, Artificial Sequence
  Description of Artificial Sequence: Synthetic epitope
TEKMGNTVES

SEQ ID NO: 50097 - protein, 10 aa, Artificial Sequence
  Description of Artificial Sequence: Synthetic epitope
TEKNASKATE

SEQ ID NO: 50098 - protein, 10 aa, Artificial Sequence
  Description of Artificial Sequence: Synthetic epitope
TEKNTLELSN

SEQ ID NO: 50099 - protein, 10 aa, Artificial Sequence
  Description of Artificial Sequence: Synthetic epitope
TEKQKSLGQK

SEQ ID NO: 50100 - protein, 10 aa, Artificial Sequence
  Description of Artificial Sequence: Synthetic epitope
TEKRIIEVSK

SEQ ID NO: 50101 - protein, 10 aa, Artificial Sequence
  Description of Artificial Sequence: Synthetic epitope
TEKRLSSGQN

SEQ ID NO: 50102 - protein, 10 aa, Artificial Sequence
  Description of Artificial Sequence: Synthetic epitope
TEKSSQIVDP

SEQ ID NO: 50103 - protein, 10 aa, Artificial Sequence
  Description of Artificial Sequence: Synthetic epitope
TEKSSVRELH

SEQ ID NO: 50104 - protein, 10 aa, Artificial Sequence
  Description of Artificial Sequence: Synthetic epitope
TEKSTSVLSK

SEQ ID NO: 50105 - protein, 10 aa, Artificial Sequence
  Description of Artificial Sequence: Synthetic epitope
TEKTITPPEP

SEQ ID NO: 50106 - protein, 10 aa, Artificial Sequence
  Description of Artificial Sequence: Synthetic epitope
TEKTKKDRRS

SEQ ID NO: 50107 - protein, 10 aa, Artificial Sequence
  Description of Artificial Sequence: Synthetic epitope
TEKTLLEEKV

SEQ ID NO: 50108 - protein, 10 aa, Artificial Sequence
  Description of Artificial Sequence: Synthetic epitope
TEKTSKDTSA

SEQ ID NO: 50109 - protein, 10 aa, Artificial Sequence
  Description of Artificial Sequence: Synthetic epitope
TEKTYTSTSN

SEQ ID NO: 50110 - protein, 10 aa, Artificial Sequence
  Description of Artificial Sequence: Synthetic epitope
TEKVAKVEEK

SEQ ID NO: 50111 - protein, 10 aa, Artificial Sequence
  Description of Artificial Sequence: Synthetic epitope
TEKVALSEKE

SEQ ID NO: 50112 - protein, 10 aa, Artificial Sequence
  Description of Artificial Sequence: Synthetic epitope
TEKVLQQEAE

SEQ ID NO: 50113 - protein, 10 aa, Artificial Sequence
  Description of Artificial Sequence: Synthetic epitope
TEKVTLSEKE

SEQ ID NO: 50114 - protein, 10 aa, Artificial Sequence
  Description of Artificial Sequence: Synthetic epitope
TELASEVSQL

SEQ ID NO: 50115 - protein, 10 aa, Artificial Sequence
  Description of Artificial Sequence: Synthetic epitope
TELDTKDVDA

SEQ ID NO: 50116 - protein, 10 aa, Artificial Sequence
  Description of Artificial Sequence: Synthetic epitope
TELDTNQHRT

SEQ ID NO: 50117 - protein, 10 aa, Artificial Sequence
  Description of Artificial Sequence: Synthetic epitope
TELEKAVIVL

SEQ ID NO: 50118 - protein, 10 aa, Artificial Sequence
  Description of Artificial Sequence: Synthetic epitope
TELIFYADDQ

SEQ ID NO: 50119 - protein, 10 aa, Artificial Sequence
  Description of Artificial Sequence: Synthetic epitope
TELKAKLADT

SEQ ID NO: 50120 - protein, 10 aa, Artificial Sequence
  Description of Artificial Sequence: Synthetic epitope
TELKTYSEKL

SEQ ID NO: 50121 - protein, 10 aa, Artificial Sequence
  Description of Artificial Sequence: Synthetic epitope
TELLAGQKKS

SEQ ID NO: 50122 - protein, 10 aa, Artificial Sequence
  Description of Artificial Sequence: Synthetic epitope
TELLASARDK

SEQ ID NO: 50123 - protein, 10 aa, Artificial Sequence
  Description of Artificial Sequence: Synthetic epitope
TELLDQVEGA

SEQ ID NO: 50124 - protein, 10 aa, Artificial Sequence
  Description of Artificial Sequence: Synthetic epitope
TELLQLTQLE

SEQ ID NO: 50125 - protein, 10 aa, Artificial Sequence
  Description of Artificial Sequence: Synthetic epitope
TELLSASASH

SEQ ID NO: 50126 - protein, 10 aa, Artificial Sequence
  Description of Artificial Sequence: Synthetic epitope
TELLSLQTED

SEQ ID NO: 50127 - protein, 10 aa, Artificial Sequence
  Description of Artificial Sequence: Synthetic epitope
TELNTKEFAG

SEQ ID NO: 50128 - protein, 10 aa, Artificial Sequence
  Description of Artificial Sequence: Synthetic epitope
TELPITQLTS

SEQ ID NO: 50129 - protein, 10 aa, Artificial Sequence
  Description of Artificial Sequence: Synthetic epitope
TELQKNGMNM

SEQ ID NO: 50130 - protein, 10 aa, Artificial Sequence
  Description of Artificial Sequence: Synthetic epitope
TELQQEQLQT

SEQ ID NO: 50131 - protein, 10 aa, Artificial Sequence
  Description of Artificial Sequence: Synthetic epitope
TELRSVTNGQ

SEQ ID NO: 50132 - protein, 10 aa, Artificial Sequence
  Description of Artificial Sequence: Synthetic epitope
TELSDQQDQA

SEQ ID NO: 50133 - protein, 10 aa, Artificial Sequence
  Description of Artificial Sequence: Synthetic epitope
TELSGASSFD

SEQ ID NO: 50134 - protein, 10 aa, Artificial Sequence
  Description of Artificial Sequence: Synthetic epitope
TELSGTLTDG

SEQ ID NO: 50135 - protein, 10 aa, Artificial Sequence
  Description of Artificial Sequence: Synthetic epitope
TELSGTLTDG

SEQ ID NO: 50136 - protein, 10 aa, Artificial Sequence
  Description of Artificial Sequence: Synthetic epitope
TELSIAKAKA

SEQ ID NO: 50137 - protein, 10 aa, Artificial Sequence
  Description of Artificial Sequence: Synthetic epitope
TELSQSVSEA

SEQ ID NO: 50138 - protein, 10 aa, Artificial Sequence
  Description of Artificial Sequence: Synthetic epitope
TELSSTAKSK

SEQ ID NO: 50139 - protein, 10 aa, Artificial Sequence
  Description of Artificial Sequence: Synthetic epitope
TELSTILEES

SEQ ID NO: 50140 - protein, 10 aa, Artificial Sequence
  Description of Artificial Sequence: Synthetic epitope
TELTKSINDN

SEQ ID NO: 50141 - protein, 10 aa, Artificial Sequence
  Description of Artificial Sequence: Synthetic epitope
TELTTAIRTY

SEQ ID NO: 50142 - protein, 10 aa, Artificial Sequence
  Description of Artificial Sequence: Synthetic epitope
TELVTNIQVA

SEQ ID NO: 50143 - protein, 10 aa, Artificial Sequence
  Description of Artificial Sequence: Synthetic epitope
TEMAEMAEPI

SEQ ID NO: 50144 - protein, 10 aa, Artificial Sequence
  Description of Artificial Sequence: Synthetic epitope
TEMAPKKTSK

SEQ ID NO: 50145 - protein, 10 aa, Artificial Sequence
  Description of Artificial Sequence: Synthetic epitope
TEMERAEVLT

SEQ ID NO: 50146 - protein, 10 aa, Artificial Sequence
  Description of Artificial Sequence: Synthetic epitope
TEMFQGMRVR

SEQ ID NO: 50147 - protein, 10 aa, Artificial Sequence
  Description of Artificial Sequence: Synthetic epitope
TEMIDQEEGI

SEQ ID NO: 50148 - protein, 10 aa, Artificial Sequence
  Description of Artificial Sequence: Synthetic epitope
TEMKPEELVG

SEQ ID NO: 50149 - protein, 10 aa, Artificial Sequence
  Description of Artificial Sequence: Synthetic epitope
TEMKVSEKSH

SEQ ID NO: 50150 - protein, 10 aa, Artificial Sequence
  Description of Artificial Sequence: Synthetic epitope
TEMLTSELQT

SEQ ID NO: 50151 - protein, 10 aa, Artificial Sequence
  Description of Artificial Sequence: Synthetic epitope
TEMQPIDRNQ

SEQ ID NO: 50152 - protein, 10 aa, Artificial Sequence
  Description of Artificial Sequence: Synthetic epitope
TEMQSSESKD

SEQ ID NO: 50153 - protein, 10 aa, Artificial Sequence
  Description of Artificial Sequence: Synthetic epitope
TEMSGAGDSE

SEQ ID NO: 50154 - protein, 10 aa, Artificial Sequence
  Description of Artificial Sequence: Synthetic epitope
TEMSKYKHKS

SEQ ID NO: 50155 - protein, 10 aa, Artificial Sequence
  Description of Artificial Sequence: Synthetic epitope
TEMTNASEKK

SEQ ID NO: 50156 - protein, 10 aa, Artificial Sequence
  Description of Artificial Sequence: Synthetic epitope
TEMTNKASKE

SEQ ID NO: 50157 - protein, 10 aa, Artificial Sequence
  Description of Artificial Sequence: Synthetic epitope
TENEAVMSPE

SEQ ID NO: 50158 - protein, 10 aa, Artificial Sequence
  Description of Artificial Sequence: Synthetic epitope
TENEEASVIE

SEQ ID NO: 50159 - protein, 10 aa, Artificial Sequence
  Description of Artificial Sequence: Synthetic epitope
TENEGDKTEE

SEQ ID NO: 50160 - protein, 10 aa, Artificial Sequence
  Description of Artificial Sequence: Synthetic epitope
TENGKEAKSQ

SEQ ID NO: 50161 - protein, 10 aa, Artificial Sequence
  Description of Artificial Sequence: Synthetic epitope
TENIIAANHW

SEQ ID NO: 50162 - protein, 10 aa, Artificial Sequence
  Description of Artificial Sequence: Synthetic epitope
TENISTSTGE

SEQ ID NO: 50163 - protein, 10 aa, Artificial Sequence
  Description of Artificial Sequence: Synthetic epitope
TENKITTKNA

SEQ ID NO: 50164 - protein, 10 aa, Artificial Sequence
  Description of Artificial Sequence: Synthetic epitope
TENLDSIQGE

SEQ ID NO: 50165 - protein, 10 aa, Artificial Sequence
  Description of Artificial Sequence: Synthetic epitope
TENLLETPLE

SEQ ID NO: 50166 - protein, 10 aa, Artificial Sequence
  Description of Artificial Sequence: Synthetic epitope
TENMESQNVD

SEQ ID NO: 50167 - protein, 10 aa, Artificial Sequence
  Description of Artificial Sequence: Synthetic epitope
TENQAQSTHT

SEQ ID NO: 50168 - protein, 10 aa, Artificial Sequence
  Description of Artificial Sequence: Synthetic epitope
TENQQKSTNV

SEQ ID NO: 50169 - protein, 10 aa, Artificial Sequence
  Description of Artificial Sequence: Synthetic epitope
TENRNSSRDK

SEQ ID NO: 50170 - protein, 10 aa, Artificial Sequence
  Description of Artificial Sequence: Synthetic epitope
TENSDTSRQI

SEQ ID NO: 50171 - protein, 10 aa, Artificial Sequence
  Description of Artificial Sequence: Synthetic epitope
TENSTSAPAA

SEQ ID NO: 50172 - protein, 10 aa, Artificial Sequence
  Description of Artificial Sequence: Synthetic epitope
TENVEAASSG

SEQ ID NO: 50173 - protein, 10 aa, Artificial Sequence
  Description of Artificial Sequence: Synthetic epitope
TEPASTMSPP

SEQ ID NO: 50174 - protein, 10 aa, Artificial Sequence
  Description of Artificial Sequence: Synthetic epitope
TEPEQTEPEQ

SEQ ID NO: 50175 - protein, 10 aa, Artificial Sequence
  Description of Artificial Sequence: Synthetic epitope
TEPIETKFYE

SEQ ID NO: 50176 - protein, 10 aa, Artificial Sequence
  Description of Artificial Sequence: Synthetic epitope
TEPIKPEQTT

SEQ ID NO: 50177 - protein, 10 aa, Artificial Sequence
  Description of Artificial Sequence: Synthetic epitope
TEPQSEEQLS

SEQ ID NO: 50178 - protein, 10 aa, Artificial Sequence
  Description of Artificial Sequence: Synthetic epitope
TEPSQQIQME

SEQ ID NO: 50179 - protein, 10 aa, Artificial Sequence
  Description of Artificial Sequence: Synthetic epitope
TEPTASQLAF

SEQ ID NO: 50180 - protein, 10 aa, Artificial Sequence
  Description of Artificial Sequence: Synthetic epitope
TEPTKKSEKQ

SEQ ID NO: 50181 - protein, 10 aa, Artificial Sequence
  Description of Artificial Sequence: Synthetic epitope
TEPTSETQDE

SEQ ID NO: 50182 - protein, 10 aa, Artificial Sequence
  Description of Artificial Sequence: Synthetic epitope
TEPTVEVEEF

SEQ ID NO: 50183 - protein, 10 aa, Artificial Sequence
  Description of Artificial Sequence: Synthetic epitope
TEPVSKLKLD

SEQ ID NO: 50184 - protein, 10 aa, Artificial Sequence
  Description of Artificial Sequence: Synthetic epitope
TEQAATQEST

SEQ ID NO: 50185 - protein, 10 aa, Artificial Sequence
  Description of Artificial Sequence: Synthetic epitope
TEQEKAAMDS

SEQ ID NO: 50186 - protein, 10 aa, Artificial Sequence
  Description of Artificial Sequence: Synthetic epitope
TEQKEIASEE

SEQ ID NO: 50187 - protein, 10 aa, Artificial Sequence
  Description of Artificial Sequence: Synthetic epitope
TEQKRISKSD

SEQ ID NO: 50188 - protein, 10 aa, Artificial Sequence
  Description of Artificial Sequence: Synthetic epitope
TEQKTKVPEV

SEQ ID NO: 50189 - protein, 10 aa, Artificial Sequence
  Description of Artificial Sequence: Synthetic epitope
TEQLQFTIFA

SEQ ID NO: 50190 - protein, 10 aa, Artificial Sequence
  Description of Artificial Sequence: Synthetic epitope
TEQMNIVYSG

SEQ ID NO: 50191 - protein, 10 aa, Artificial Sequence
  Description of Artificial Sequence: Synthetic epitope
TEQNEVPRVV

SEQ ID NO: 50192 - protein, 10 aa, Artificial Sequence
  Description of Artificial Sequence: Synthetic epitope
TEQNSSKENA

SEQ ID NO: 50193 - protein, 10 aa, Artificial Sequence
  Description of Artificial Sequence: Synthetic epitope
TEQQESDSVQ

SEQ ID NO: 50194 - protein, 10 aa, Artificial Sequence
  Description of Artificial Sequence: Synthetic epitope
TEQQGALSSE

SEQ ID NO: 50195 - protein, 10 aa, Artificial Sequence
  Description of Artificial Sequence: Synthetic epitope
TEQRTSSKES

SEQ ID NO: 50196 - protein, 10 aa, Artificial Sequence
  Description of Artificial Sequence: Synthetic epitope
TEQSENLQVQ

SEQ ID NO: 50197 - protein, 10 aa, Artificial Sequence
  Description of Artificial Sequence: Synthetic epitope
TEQSIATAIS

SEQ ID NO: 50198 - protein, 10 aa, Artificial Sequence
  Description of Artificial Sequence: Synthetic epitope
TEQSVAQVLQ

SEQ ID NO: 50199 - protein, 10 aa, Artificial Sequence
  Description of Artificial Sequence: Synthetic epitope
TEQTERDSAT

SEQ ID NO: 50200 - protein, 10 aa, Artificial Sequence
  Description of Artificial Sequence: Synthetic epitope
TEQTTKSEEV

SEQ ID NO: 50201 - protein, 10 aa, Artificial Sequence
  Description of Artificial Sequence: Synthetic epitope
TEQTVSQVLQ

SEQ ID NO: 50202 - protein, 10 aa, Artificial Sequence
  Description of Artificial Sequence: Synthetic epitope
TERDASQTQP

SEQ ID NO: 50203 - protein, 10 aa, Artificial Sequence
  Description of Artificial Sequence: Synthetic epitope
TERENPEAET

SEQ ID NO: 50204 - protein, 10 aa, Artificial Sequence
  Description of Artificial Sequence: Synthetic epitope
TERIHQMEEN

SEQ ID NO: 50205 - protein, 10 aa, Artificial Sequence
  Description of Artificial Sequence: Synthetic epitope
TERKITSLSS

SEQ ID NO: 50206 - protein, 10 aa, Artificial Sequence
  Description of Artificial Sequence: Synthetic epitope
TERMTNVKSS

SEQ ID NO: 50207 - protein, 10 aa, Artificial Sequence
  Description of Artificial Sequence: Synthetic epitope
TERNENQEES

SEQ ID NO: 50208 - protein, 10 aa, Artificial Sequence
  Description of Artificial Sequence: Synthetic epitope
TERPLATDRA

SEQ ID NO: 50209 - protein, 10 aa, Artificial Sequence
  Description of Artificial Sequence: Synthetic epitope
TERRAEVPTA

SEQ ID NO: 50210 - protein, 10 aa, Artificial Sequence
  Description of Artificial Sequence: Synthetic epitope
TERRKEDTPT

SEQ ID NO: 50211 - protein, 10 aa, Artificial Sequence
  Description of Artificial Sequence: Synthetic epitope
TERSMEVNHP

SEQ ID NO: 50212 - protein, 10 aa, Artificial Sequence
  Description of Artificial Sequence: Synthetic epitope
TERTKTSSLE

SEQ ID NO: 50213 - protein, 10 aa, Artificial Sequence
  Description of Artificial Sequence: Synthetic epitope
TERTKVSSYP

SEQ ID NO: 50214 - protein, 10 aa, Artificial Sequence
  Description of Artificial Sequence: Synthetic epitope
TERTSSKEAG

SEQ ID NO: 50215 - protein, 10 aa, Artificial Sequence
  Description of Artificial Sequence: Synthetic epitope
TERTTLEGHL

SEQ ID NO: 50216 - protein, 10 aa, Artificial Sequence
  Description of Artificial Sequence: Synthetic epitope
TERVAALQTV

SEQ ID NO: 50217 - protein, 10 aa, Artificial Sequence
  Description of Artificial Sequence: Synthetic epitope
TESAAKNTDA

SEQ ID NO: 50218 - protein, 10 aa, Artificial Sequence
  Description of Artificial Sequence: Synthetic epitope
TESAEIRINN

SEQ ID NO: 50219 - protein, 10 aa, Artificial Sequence
  Description of Artificial Sequence: Synthetic epitope
TESASEAEEP

SEQ ID NO: 50220 - protein, 10 aa, Artificial Sequence
  Description of Artificial Sequence: Synthetic epitope
TESDSVSAAS

SEQ ID NO: 50221 - protein, 10 aa, Artificial Sequence
  Description of Artificial Sequence: Synthetic epitope
TESEAVVQVA

SEQ ID NO: 50222 - protein, 10 aa, Artificial Sequence
  Description of Artificial Sequence: Synthetic epitope
TESEHSLSPA

SEQ ID NO: 50223 - protein, 10 aa, Artificial Sequence
  Description of Artificial Sequence: Synthetic epitope
TESEKREEPN

SEQ ID NO: 50224 - protein, 10 aa, Artificial Sequence
  Description of Artificial Sequence: Synthetic epitope
TESEKTVQVA

SEQ ID NO: 50225 - protein, 10 aa, Artificial Sequence
  Description of Artificial Sequence: Synthetic epitope
TESEMFNKLE

SEQ ID NO: 50226 - protein, 10 aa, Artificial Sequence
  Description of Artificial Sequence: Synthetic epitope
TESEMNSNTS

SEQ ID NO: 50227 - protein, 10 aa, Artificial Sequence
  Description of Artificial Sequence: Synthetic epitope
TESEVMKYIT

SEQ ID NO: 50228 - protein, 10 aa, Artificial Sequence
  Description of Artificial Sequence: Synthetic epitope
TESHRVAGED

SEQ ID NO: 50229 - protein, 10 aa, Artificial Sequence
  Description of Artificial Sequence: Synthetic epitope
TESIGSSEKT

SEQ ID NO: 50230 - protein, 10 aa, Artificial Sequence
  Description of Artificial Sequence: Synthetic epitope
TESKFSVASD

SEQ ID NO: 50231 - protein, 10 aa, Artificial Sequence
  Description of Artificial Sequence: Synthetic epitope
TESKGEMKKE

SEQ ID NO: 50232 - protein, 10 aa, Artificial Sequence
  Description of Artificial Sequence: Synthetic epitope
TESKIDRDKS

SEQ ID NO: 50233 - protein, 10 aa, Artificial Sequence
  Description of Artificial Sequence: Synthetic epitope
TESKKMSSEL

SEQ ID NO: 50234 - protein, 10 aa, Artificial Sequence
  Description of Artificial Sequence: Synthetic epitope
TESLISSLGL

SEQ ID NO: 50235 - protein, 10 aa, Artificial Sequence
  Description of Artificial Sequence: Synthetic epitope
TESLSASESL

SEQ ID NO: 50236 - protein, 10 aa, Artificial Sequence
  Description of Artificial Sequence: Synthetic epitope
TESNRISHHK

SEQ ID NO: 50237 - protein, 10 aa, Artificial Sequence
  Description of Artificial Sequence: Synthetic epitope
TESQKEQRSE

SEQ ID NO: 50238 - protein, 10 aa, Artificial Sequence
  Description of Artificial Sequence: Synthetic epitope
TESQSLLQQS

SEQ ID NO: 50239 - protein, 10 aa, Artificial Sequence
  Description of Artificial Sequence: Synthetic epitope
TESREVSSAD

SEQ ID NO: 50240 - protein, 10 aa, Artificial Sequence
  Description of Artificial Sequence: Synthetic epitope
TESRIPVSKS

SEQ ID NO: 50241 - protein, 10 aa, Artificial Sequence
  Description of Artificial Sequence: Synthetic epitope
TESRMSVSSD

SEQ ID NO: 50242 - protein, 10 aa, Artificial Sequence
  Description of Artificial Sequence: Synthetic epitope
TESSEGEGKE

SEQ ID NO: 50243 - protein, 10 aa, Artificial Sequence
  Description of Artificial Sequence: Synthetic epitope
TESSEMAQGL

SEQ ID NO: 50244 - protein, 10 aa, Artificial Sequence
  Description of Artificial Sequence: Synthetic epitope
TESSNLSEIE

SEQ ID NO: 50245 - protein, 10 aa, Artificial Sequence
  Description of Artificial Sequence: Synthetic epitope
TESSQQTLQN

SEQ ID NO: 50246 - protein, 10 aa, Artificial Sequence
  Description of Artificial Sequence: Synthetic epitope
TESTKAVTTN

SEQ ID NO: 50247 - protein, 10 aa, Artificial Sequence
  Description of Artificial Sequence: Synthetic epitope
TESTTETKEP

SEQ ID NO: 50248 - protein, 10 aa, Artificial Sequence
  Description of Artificial Sequence: Synthetic epitope
TESVNSIRRL

SEQ ID NO: 50249 - protein, 10 aa, Artificial Sequence
  Description of Artificial Sequence: Synthetic epitope
TESVQNSIKY

SEQ ID NO: 50250 - protein, 10 aa, Artificial Sequence
  Description of Artificial Sequence: Synthetic epitope
TETAKMYAVD

SEQ ID NO: 50251 - protein, 10 aa, Artificial Sequence
  Description of Artificial Sequence: Synthetic epitope
TETATFQTQD

SEQ ID NO: 50252 - protein, 10 aa, Artificial Sequence
  Description of Artificial Sequence: Synthetic epitope
TETATKRQET

SEQ ID NO: 50253 - protein, 10 aa, Artificial Sequence
  Description of Artificial Sequence: Synthetic epitope
TETEALASNL

SEQ ID NO: 50254 - protein, 10 aa, Artificial Sequence
  Description of Artificial Sequence: Synthetic epitope
TETEANFPPE

SEQ ID NO: 50255 - protein, 10 aa, Artificial Sequence
  Description of Artificial Sequence: Synthetic epitope
TETEATLLQK

SEQ ID NO: 50256 - protein, 10 aa, Artificial Sequence
  Description of Artificial Sequence: Synthetic epitope
TETELVQKST

SEQ ID NO: 50257 - protein, 10 aa, Artificial Sequence
  Description of Artificial Sequence: Synthetic epitope
TETEVPALNK

SEQ ID NO: 50258 - protein, 10 aa, Artificial Sequence
  Description of Artificial Sequence: Synthetic epitope
TETHQLAELN

SEQ ID NO: 50259 - protein, 10 aa, Artificial Sequence
  Description of Artificial Sequence: Synthetic epitope
TETIDESKKE

SEQ ID NO: 50260 - protein, 10 aa, Artificial Sequence
  Description of Artificial Sequence: Synthetic epitope
TETKSMIFSP

SEQ ID NO: 50261 - protein, 10 aa, Artificial Sequence
  Description of Artificial Sequence: Synthetic epitope
TETKVTSTVP

SEQ ID NO: 50262 - protein, 10 aa, Artificial Sequence
  Description of Artificial Sequence: Synthetic epitope
TETLMGGVSL

SEQ ID NO: 50263 - protein, 10 aa, Artificial Sequence
  Description of Artificial Sequence: Synthetic epitope
TETLTDSNAQ

SEQ ID NO: 50264 - protein, 10 aa, Artificial Sequence
  Description of Artificial Sequence: Synthetic epitope
TETMGINGSA

SEQ ID NO: 50265 - protein, 10 aa, Artificial Sequence
  Description of Artificial Sequence: Synthetic epitope
TETMTAAVTN

SEQ ID NO: 50266 - protein, 10 aa, Artificial Sequence
  Description of Artificial Sequence: Synthetic epitope
TETPQDTIEL

SEQ ID NO: 50267 - protein, 10 aa, Artificial Sequence
  Description of Artificial Sequence: Synthetic epitope
TETSFQIVSL

SEQ ID NO: 50268 - protein, 10 aa, Artificial Sequence
  Description of Artificial Sequence: Synthetic epitope
TETSSMHGAN

SEQ ID NO: 50269 - protein, 10 aa, Artificial Sequence
  Description of Artificial Sequence: Synthetic epitope
TETSTSASTS

SEQ ID NO: 50270 - protein, 10 aa, Artificial Sequence
  Description of Artificial Sequence: Synthetic epitope
TETTEAIDDE

SEQ ID NO: 50271 - protein, 10 aa, Artificial Sequence
  Description of Artificial Sequence: Synthetic epitope
TETVKAQAES

SEQ ID NO: 50272 - protein, 10 aa, Artificial Sequence
  Description of Artificial Sequence: Synthetic epitope
TETVPQVKKE

SEQ ID NO: 50273 - protein, 10 aa, Artificial Sequence
  Description of Artificial Sequence: Synthetic epitope
TEVDAASVYT

SEQ ID NO: 50274 - protein, 10 aa, Artificial Sequence
  Description of Artificial Sequence: Synthetic epitope
TEVEILEKSQ

SEQ ID NO: 50275 - protein, 10 aa, Artificial Sequence
  Description of Artificial Sequence: Synthetic epitope
TEVGKTTRQA

SEQ ID NO: 50276 - protein, 10 aa, Artificial Sequence
  Description of Artificial Sequence: Synthetic epitope
TEVIVDMKST

SEQ ID NO: 50277 - protein, 10 aa, Artificial Sequence
  Description of Artificial Sequence: Synthetic epitope
TEVKTLKLSG

SEQ ID NO: 50278 - protein, 10 aa, Artificial Sequence
  Description of Artificial Sequence: Synthetic epitope
TEVLMWMGMT

SEQ ID NO: 50279 - protein, 10 aa, Artificial Sequence
  Description of Artificial Sequence: Synthetic epitope
TEVLRAAKET

SEQ ID NO: 50280 - protein, 10 aa, Artificial Sequence
  Description of Artificial Sequence: Synthetic epitope
TEVLRTEAEQ

SEQ ID NO: 50281 - protein, 10 aa, Artificial Sequence
  Description of Artificial Sequence: Synthetic epitope
TEVLSAVLKD

SEQ ID NO: 50282 - protein, 10 aa, Artificial Sequence
  Description of Artificial Sequence: Synthetic epitope
TEVMEQIHST

SEQ ID NO: 50283 - protein, 10 aa, Artificial Sequence
  Description of Artificial Sequence: Synthetic epitope
TEVNSSNESK

SEQ ID NO: 50284 - protein, 10 aa, Artificial Sequence
  Description of Artificial Sequence: Synthetic epitope
TEVPEQDDEL

SEQ ID NO: 50285 - protein, 10 aa, Artificial Sequence
  Description of Artificial Sequence: Synthetic epitope
TEVQVEQATP

SEQ ID NO: 50286 - protein, 10 aa, Artificial Sequence
  Description of Artificial Sequence: Synthetic epitope
TEVRALSINT

SEQ ID NO: 50287 - protein, 10 aa, Artificial Sequence
  Description of Artificial Sequence: Synthetic epitope
TEVSLDESLS

SEQ ID NO: 50288 - protein, 10 aa, Artificial Sequence
  Description of Artificial Sequence: Synthetic epitope
TEVSVPETLE

SEQ ID NO: 50289 - protein, 10 aa, Artificial Sequence
  Description of Artificial Sequence: Synthetic epitope
TEVTARMEML

SEQ ID NO: 50290 - protein, 10 aa, Artificial Sequence
  Description of Artificial Sequence: Synthetic epitope
TEVTEAEHTA

SEQ ID NO: 50291 - protein, 10 aa, Artificial Sequence
  Description of Artificial Sequence: Synthetic epitope
TEVTPAAQVD

SEQ ID NO: 50292 - protein, 10 aa, Artificial Sequence
  Description of Artificial Sequence: Synthetic epitope
TEVVAAVKGK

SEQ ID NO: 50293 - protein, 10 aa, Artificial Sequence
  Description of Artificial Sequence: Synthetic epitope
TEVVMNSQQT

SEQ ID NO: 50294 - protein, 10 aa, Artificial Sequence
  Description of Artificial Sequence: Synthetic epitope
TEVYAINRQR

SEQ ID NO: 50295 - protein, 10 aa, Artificial Sequence
  Description of Artificial Sequence: Synthetic epitope
TEVYAKANSF

SEQ ID NO: 50296 - protein, 10 aa, Artificial Sequence
  Description of Artificial Sequence: Synthetic epitope
TEWWKASPQE

SEQ ID NO: 50297 - protein, 10 aa, Artificial Sequence
  Description of Artificial Sequence: Synthetic epitope
TEYAAVPFDS

SEQ ID NO: 50298 - protein, 10 aa, Artificial Sequence
  Description of Artificial Sequence: Synthetic epitope
TEYEDNLKNS

SEQ ID NO: 50299 - protein, 10 aa, Artificial Sequence
  Description of Artificial Sequence: Synthetic epitope
TEYRSYNPQK

SEQ ID NO: 50300 - protein, 10 aa, Artificial Sequence
  Description of Artificial Sequence: Synthetic epitope
TEYSSDIRLP

SEQ ID NO: 50301 - protein, 10 aa, Artificial Sequence
  Description of Artificial Sequence: Synthetic epitope
TEYSYPPSKV

SEQ ID NO: 50302 - protein, 10 aa, Artificial Sequence
  Description of Artificial Sequence: Synthetic epitope
TEYTRRYREA

SEQ ID NO: 50303 - protein, 10 aa, Artificial Sequence
  Description of Artificial Sequence: Synthetic epitope
TEYVQHIQQA

SEQ ID NO: 50304 - protein, 10 aa, Artificial Sequence
  Description of Artificial Sequence: Synthetic epitope
TFADAHRPKL

SEQ ID NO: 50305 - protein, 10 aa, Artificial Sequence
  Description of Artificial Sequence: Synthetic epitope
TFAEARLISA

SEQ ID NO: 50306 - protein, 10 aa, Artificial Sequence
  Description of Artificial Sequence: Synthetic epitope
TFALASQQKA

SEQ ID NO: 50307 - protein, 10 aa, Artificial Sequence
  Description of Artificial Sequence: Synthetic epitope
TFASAQAEAR

SEQ ID NO: 50308 - protein, 10 aa, Artificial Sequence
  Description of Artificial Sequence: Synthetic epitope
TFDARNISKE

SEQ ID NO: 50309 - protein, 10 aa, Artificial Sequence
  Description of Artificial Sequence: Synthetic epitope
TFDELRETKT

SEQ ID NO: 50310 - protein, 10 aa, Artificial Sequence
  Description of Artificial Sequence: Synthetic epitope
TFENKASMQE

SEQ ID NO: 50311 - protein, 10 aa, Artificial Sequence
  Description of Artificial Sequence: Synthetic epitope
TFESAITPSE

SEQ ID NO: 50312 - protein, 10 aa, Artificial Sequence
  Description of Artificial Sequence: Synthetic epitope
TFFKMVSMRD

SEQ ID NO: 50313 - protein, 10 aa, Artificial Sequence
  Description of Artificial Sequence: Synthetic epitope
TFGQSATVTG

SEQ ID NO: 50314 - protein, 10 aa, Artificial Sequence
  Description of Artificial Sequence: Synthetic epitope
TFIASEVEER

SEQ ID NO: 50315 - protein, 10 aa, Artificial Sequence
  Description of Artificial Sequence: Synthetic epitope
TFIRLIILGK

SEQ ID NO: 50316 - protein, 10 aa, Artificial Sequence
  Description of Artificial Sequence: Synthetic epitope
TFKATNKKRE

SEQ ID NO: 50317 - protein, 10 aa, Artificial Sequence
  Description of Artificial Sequence: Synthetic epitope
TFKKSAKGLE

SEQ ID NO: 50318 - protein, 10 aa, Artificial Sequence
  Description of Artificial Sequence: Synthetic epitope
TFKSMTLGSL

SEQ ID NO: 50319 - protein, 10 aa, Artificial Sequence
  Description of Artificial Sequence: Synthetic epitope
TFLKNEVVKA

SEQ ID NO: 50320 - protein, 10 aa, Artificial Sequence
  Description of Artificial Sequence: Synthetic epitope
TFLLTTSSKE

SEQ ID NO: 50321 - protein, 10 aa, Artificial Sequence
  Description of Artificial Sequence: Synthetic epitope
TFLTKAISKF

SEQ ID NO: 50322 - protein, 10 aa, Artificial Sequence
  Description of Artificial Sequence: Synthetic epitope
TFLTTGVLST

SEQ ID NO: 50323 - protein, 10 aa, Artificial Sequence
  Description of Artificial Sequence: Synthetic epitope
TFLVLERSSA

SEQ ID NO: 50324 - protein, 10 aa, Artificial Sequence
  Description of Artificial Sequence: Synthetic epitope
TFMENSQEMD

SEQ ID NO: 50325 - protein, 10 aa, Artificial Sequence
  Description of Artificial Sequence: Synthetic epitope
TFMSAVSSQE

SEQ ID NO: 50326 - protein, 10 aa, Artificial Sequence
  Description of Artificial Sequence: Synthetic epitope
TFNHGIAQTH

SEQ ID NO: 50327 - protein, 10 aa, Artificial Sequence
  Description of Artificial Sequence: Synthetic epitope
TFPRQSRATE

SEQ ID NO: 50328 - protein, 10 aa, Artificial Sequence
  Description of Artificial Sequence: Synthetic epitope
TFQENDLSTF

SEQ ID NO: 50329 - protein, 10 aa, Artificial Sequence
  Description of Artificial Sequence: Synthetic epitope
TFQQHHLHRP

SEQ ID NO: 50330 - protein, 10 aa, Artificial Sequence
  Description of Artificial Sequence: Synthetic epitope
TFQQNALSQQ

SEQ ID NO: 50331 - protein, 10 aa, Artificial Sequence
  Description of Artificial Sequence: Synthetic epitope
TFRITKADAA

SEQ ID NO: 50332 - protein, 10 aa, Artificial Sequence
  Description of Artificial Sequence: Synthetic epitope
TFRKSLRGQK

SEQ ID NO: 50333 - protein, 10 aa, Artificial Sequence
  Description of Artificial Sequence: Synthetic epitope
TFRLSPLKST

SEQ ID NO: 50334 - protein, 10 aa, Artificial Sequence
  Description of Artificial Sequence: Synthetic epitope
TFRSSLSSDY

SEQ ID NO: 50335 - protein, 10 aa, Artificial Sequence
  Description of Artificial Sequence: Synthetic epitope
TFRSSLSVRL

SEQ ID NO: 50336 - protein, 10 aa, Artificial Sequence
  Description of Artificial Sequence: Synthetic epitope
TFRTTIEKPV

SEQ ID NO: 50337 - protein, 10 aa, Artificial Sequence
  Description of Artificial Sequence: Synthetic epitope
TFRVSDKSAF

SEQ ID NO: 50338 - protein, 10 aa, Artificial Sequence
  Description of Artificial Sequence: Synthetic epitope
TFSAPVGESA

SEQ ID NO: 50339 - protein, 10 aa, Artificial Sequence
  Description of Artificial Sequence: Synthetic epitope
TFSKTLSGSS

SEQ ID NO: 50340 - protein, 10 aa, Artificial Sequence
  Description of Artificial Sequence: Synthetic epitope
TFSPKAVTKL

SEQ ID NO: 50341 - protein, 10 aa, Artificial Sequence
  Description of Artificial Sequence: Synthetic epitope
TFSQDYVANE

SEQ ID NO: 50342 - protein, 10 aa, Artificial Sequence
  Description of Artificial Sequence: Synthetic epitope
TFTSFGEYKH

SEQ ID NO: 50343 - protein, 10 aa, Artificial Sequence
  Description of Artificial Sequence: Synthetic epitope
TFVTEAMEVL

SEQ ID NO: 50344 - protein, 10 aa, Artificial Sequence
  Description of Artificial Sequence: Synthetic epitope
TFYKASDFGQ

SEQ ID NO: 50345 - protein, 10 aa, Artificial Sequence
  Description of Artificial Sequence: Synthetic epitope
TFYPSRLFRA

SEQ ID NO: 50346 - protein, 10 aa, Artificial Sequence
  Description of Artificial Sequence: Synthetic epitope
TFYQQLYKTQ

SEQ ID NO: 50347 - protein, 10 aa, Artificial Sequence
  Description of Artificial Sequence: Synthetic epitope
TFYSHMKFHE

SEQ ID NO: 50348 - protein, 10 aa, Artificial Sequence
  Description of Artificial Sequence: Synthetic epitope
TFYTWRNVAE

SEQ ID NO: 50349 - protein, 10 aa, Artificial Sequence
  Description of Artificial Sequence: Synthetic epitope
TGAADKAIPR

SEQ ID NO: 50350 - protein, 10 aa, Artificial Sequence
  Description of Artificial Sequence: Synthetic epitope
TGADIKISGI

SEQ ID NO: 50351 - protein, 10 aa, Artificial Sequence
  Description of Artificial Sequence: Synthetic epitope
TGAESKSNGE

SEQ ID NO: 50352 - protein, 10 aa, Artificial Sequence
  Description of Artificial Sequence: Synthetic epitope
TGAGARTSAA

SEQ ID NO: 50353 - protein, 10 aa, Artificial Sequence
  Description of Artificial Sequence: Synthetic epitope
TGAIQQLGGV

SEQ ID NO: 50354 - protein, 10 aa, Artificial Sequence
  Description of Artificial Sequence: Synthetic epitope
TGAKTNRADP

SEQ ID NO: 50355 - protein, 10 aa, Artificial Sequence
  Description of Artificial Sequence: Synthetic epitope
TGAMDSQNQD

SEQ ID NO: 50356 - protein, 10 aa, Artificial Sequence
  Description of Artificial Sequence: Synthetic epitope
TGANRHQRNP

SEQ ID NO: 50357 - protein, 10 aa, Artificial Sequence
  Description of Artificial Sequence: Synthetic epitope
TGAQAELEGE

SEQ ID NO: 50358 - protein, 10 aa, Artificial Sequence
  Description of Artificial Sequence: Synthetic epitope
TGARIQISKK

SEQ ID NO: 50359 - protein, 10 aa, Artificial Sequence
  Description of Artificial Sequence: Synthetic epitope
TGARIQISKK

SEQ ID NO: 50360 - protein, 10 aa, Artificial Sequence
  Description of Artificial Sequence: Synthetic epitope
TGASMAVAAR

SEQ ID NO: 50361 - protein, 10 aa, Artificial Sequence
  Description of Artificial Sequence: Synthetic epitope
TGASSAKETT

SEQ ID NO: 50362 - protein, 10 aa, Artificial Sequence
  Description of Artificial Sequence: Synthetic epitope
TGASSLLNKS

SEQ ID NO: 50363 - protein, 10 aa, Artificial Sequence
  Description of Artificial Sequence: Synthetic epitope
TGAVEQVEEQ

SEQ ID NO: 50364 - protein, 10 aa, Artificial Sequence
  Description of Artificial Sequence: Synthetic epitope
TGAYDTIPQD

SEQ ID NO: 50365 - protein, 10 aa, Artificial Sequence
  Description of Artificial Sequence: Synthetic epitope
TGDAARQGVY

SEQ ID NO: 50366 - protein, 10 aa, Artificial Sequence
  Description of Artificial Sequence: Synthetic epitope
TGDIATEQVD

SEQ ID NO: 50367 - protein, 10 aa, Artificial Sequence
  Description of Artificial Sequence: Synthetic epitope
TGDMYEVGAE

SEQ ID NO: 50368 - protein, 10 aa, Artificial Sequence
  Description of Artificial Sequence: Synthetic epitope
TGDQREVGSL

SEQ ID NO: 50369 - protein, 10 aa, Artificial Sequence
  Description of Artificial Sequence: Synthetic epitope
TGDTNNVTSS

SEQ ID NO: 50370 - protein, 10 aa, Artificial Sequence
  Description of Artificial Sequence: Synthetic epitope
TGEAEASRMQ

SEQ ID NO: 50371 - protein, 10 aa, Artificial Sequence
  Description of Artificial Sequence: Synthetic epitope
TGEAENSNLQ

SEQ ID NO: 50372 - protein, 10 aa, Artificial Sequence
  Description of Artificial Sequence: Synthetic epitope
TGEASKLPYD

SEQ ID NO: 50373 - protein, 10 aa, Artificial Sequence
  Description of Artificial Sequence: Synthetic epitope
TGEEALVAAV

SEQ ID NO: 50374 - protein, 10 aa, Artificial Sequence
  Description of Artificial Sequence: Synthetic epitope
TGEEANSNAE

SEQ ID NO: 50375 - protein, 10 aa, Artificial Sequence
  Description of Artificial Sequence: Synthetic epitope
TGEFISLQAM

SEQ ID NO: 50376 - protein, 10 aa, Artificial Sequence
  Description of Artificial Sequence: Synthetic epitope
TGEINIMQSE

SEQ ID NO: 50377 - protein, 10 aa, Artificial Sequence
  Description of Artificial Sequence: Synthetic epitope
TGEKKSDSRN

SEQ ID NO: 50378 - protein, 10 aa, Artificial Sequence
  Description of Artificial Sequence: Synthetic epitope
TGEKSVKSLE

SEQ ID NO: 50379 - protein, 10 aa, Artificial Sequence
  Description of Artificial Sequence: Synthetic epitope
TGEKTTEIFI

SEQ ID NO: 50380 - protein, 10 aa, Artificial Sequence
  Description of Artificial Sequence: Synthetic epitope
TGELAESRQT

SEQ ID NO: 50381 - protein, 10 aa, Artificial Sequence
  Description of Artificial Sequence: Synthetic epitope
TGEQLLEALE

SEQ ID NO: 50382 - protein, 10 aa, Artificial Sequence
  Description of Artificial Sequence: Synthetic epitope
TGESQSRDRR

SEQ ID NO: 50383 - protein, 10 aa, Artificial Sequence
  Description of Artificial Sequence: Synthetic epitope
TGESSVILSS

SEQ ID NO: 50384 - protein, 10 aa, Artificial Sequence
  Description of Artificial Sequence: Synthetic epitope
TGETFRTDKK

SEQ ID NO: 50385 - protein, 10 aa, Artificial Sequence
  Description of Artificial Sequence: Synthetic epitope
TGETSSAKLP

SEQ ID NO: 50386 - protein, 10 aa, Artificial Sequence
  Description of Artificial Sequence: Synthetic epitope
TGEVISSVSE

SEQ ID NO: 50387 - protein, 10 aa, Artificial Sequence
  Description of Artificial Sequence: Synthetic epitope
TGEVSNGAVA

SEQ ID NO: 50388 - protein, 10 aa, Artificial Sequence
  Description of Artificial Sequence: Synthetic epitope
TGFNSIAENE

SEQ ID NO: 50389 - protein, 10 aa, Artificial Sequence
  Description of Artificial Sequence: Synthetic epitope
TGFRKISSHA

SEQ ID NO: 50390 - protein, 10 aa, Artificial Sequence
  Description of Artificial Sequence: Synthetic epitope
TGFVESAESD

SEQ ID NO: 50391 - protein, 10 aa, Artificial Sequence
  Description of Artificial Sequence: Synthetic epitope
TGGAASKLSK

SEQ ID NO: 50392 - protein, 10 aa, Artificial Sequence
  Description of Artificial Sequence: Synthetic epitope
TGGASKLDGA

SEQ ID NO: 50393 - protein, 10 aa, Artificial Sequence
  Description of Artificial Sequence: Synthetic epitope
TGGDAATRSA

SEQ ID NO: 50394 - protein, 10 aa, Artificial Sequence
  Description of Artificial Sequence: Synthetic epitope
TGGEATQETG

SEQ ID NO: 50395 - protein, 10 aa, Artificial Sequence
  Description of Artificial Sequence: Synthetic epitope
TGGLQSVKTS

SEQ ID NO: 50396 - protein, 10 aa, Artificial Sequence
  Description of Artificial Sequence: Synthetic epitope
TGGQEHETNE

SEQ ID NO: 50397 - protein, 10 aa, Artificial Sequence
  Description of Artificial Sequence: Synthetic epitope
TGGVQSTASS

SEQ ID NO: 50398 - protein, 10 aa, Artificial Sequence
  Description of Artificial Sequence: Synthetic epitope
TGHDPTANKD

SEQ ID NO: 50399 - protein, 10 aa, Artificial Sequence
  Description of Artificial Sequence: Synthetic epitope
TGHGESIQDS

SEQ ID NO: 50400 - protein, 10 aa, Artificial Sequence
  Description of Artificial Sequence: Synthetic epitope
TGHKATALQE

SEQ ID NO: 50401 - protein, 10 aa, Artificial Sequence
  Description of Artificial Sequence: Synthetic epitope
TGHQEAQFMT

SEQ ID NO: 50402 - protein, 10 aa, Artificial Sequence
  Description of Artificial Sequence: Synthetic epitope
TGILSLSNVS

SEQ ID NO: 50403 - protein, 10 aa, Artificial Sequence
  Description of Artificial Sequence: Synthetic epitope
TGILSSTAFS

SEQ ID NO: 50404 - protein, 10 aa, Artificial Sequence
  Description of Artificial Sequence: Synthetic epitope
TGIQAKTTKP

SEQ ID NO: 50405 - protein, 10 aa, Artificial Sequence
  Description of Artificial Sequence: Synthetic epitope
TGIQAKTTKP

SEQ ID NO: 50406 - protein, 10 aa, Artificial Sequence
  Description of Artificial Sequence: Synthetic epitope
TGIRAEQVNK

SEQ ID NO: 50407 - protein, 10 aa, Artificial Sequence
  Description of Artificial Sequence: Synthetic epitope
TGISKSKEAF

SEQ ID NO: 50408 - protein, 10 aa, Artificial Sequence
  Description of Artificial Sequence: Synthetic epitope
TGISQYEDDL

SEQ ID NO: 50409 - protein, 10 aa, Artificial Sequence
  Description of Artificial Sequence: Synthetic epitope
TGISRETSSD

SEQ ID NO: 50410 - protein, 10 aa, Artificial Sequence
  Description of Artificial Sequence: Synthetic epitope
TGKALVAVVA

SEQ ID NO: 50411 - protein, 10 aa, Artificial Sequence
  Description of Artificial Sequence: Synthetic epitope
TGKKAVAGQQ

SEQ ID NO: 50412 - protein, 10 aa, Artificial Sequence
  Description of Artificial Sequence: Synthetic epitope
TGKQTRTNAK

SEQ ID NO: 50413 - protein, 10 aa, Artificial Sequence
  Description of Artificial Sequence: Synthetic epitope
TGKRRKELGA

SEQ ID NO: 50414 - protein, 10 aa, Artificial Sequence
  Description of Artificial Sequence: Synthetic epitope
TGKSFMGGNM

SEQ ID NO: 50415 - protein, 10 aa, Artificial Sequence
  Description of Artificial Sequence: Synthetic epitope
TGKSIQVEGT

SEQ ID NO: 50416 - protein, 10 aa, Artificial Sequence
  Description of Artificial Sequence: Synthetic epitope
TGKSKKRIRK

SEQ ID NO: 50417 - protein, 10 aa, Artificial Sequence
  Description of Artificial Sequence: Synthetic epitope
TGKSQTLGSK

SEQ ID NO: 50418 - protein, 10 aa, Artificial Sequence
  Description of Artificial Sequence: Synthetic epitope
TGLAASSEPE

SEQ ID NO: 50419 - protein, 10 aa, Artificial Sequence
  Description of Artificial Sequence: Synthetic epitope
TGLATSSKGG

SEQ ID NO: 50420 - protein, 10 aa, Artificial Sequence
  Description of Artificial Sequence: Synthetic epitope
TGLDLKANKT

SEQ ID NO: 50421 - protein, 10 aa, Artificial Sequence
  Description of Artificial Sequence: Synthetic epitope
TGLEKMRSGK

SEQ ID NO: 50422 - protein, 10 aa, Artificial Sequence
  Description of Artificial Sequence: Synthetic epitope
TGLETSSGGK

SEQ ID NO: 50423 - protein, 10 aa, Artificial Sequence
  Description of Artificial Sequence: Synthetic epitope
TGLGSEMNAA

SEQ ID NO: 50424 - protein, 10 aa, Artificial Sequence
  Description of Artificial Sequence: Synthetic epitope
TGLKKLTELG

SEQ ID NO: 50425 - protein, 10 aa, Artificial Sequence
  Description of Artificial Sequence: Synthetic epitope
TGLKVSLQRN

SEQ ID NO: 50426 - protein, 10 aa, Artificial Sequence
  Description of Artificial Sequence: Synthetic epitope
TGLTTAKMPS

SEQ ID NO: 50427 - protein, 10 aa, Artificial Sequence
  Description of Artificial Sequence: Synthetic epitope
TGLTVTQITQ

SEQ ID NO: 50428 - protein, 10 aa, Artificial Sequence
  Description of Artificial Sequence: Synthetic epitope
TGLVAYVDLD

SEQ ID NO: 50429 - protein, 10 aa, Artificial Sequence
  Description of Artificial Sequence: Synthetic epitope
TGLVLSTVMD

SEQ ID NO: 50430 - protein, 10 aa, Artificial Sequence
  Description of Artificial Sequence: Synthetic epitope
TGLVQNQPNQ

SEQ ID NO: 50431 - protein, 10 aa, Artificial Sequence
  Description of Artificial Sequence: Synthetic epitope
TGLVRSRTHD

SEQ ID NO: 50432 - protein, 10 aa, Artificial Sequence
  Description of Artificial Sequence: Synthetic epitope
TGLVSDMGIF

SEQ ID NO: 50433 - protein, 10 aa, Artificial Sequence
  Description of Artificial Sequence: Synthetic epitope
TGMQSWTKSQ

SEQ ID NO: 50434 - protein, 10 aa, Artificial Sequence
  Description of Artificial Sequence: Synthetic epitope
TGMSMSLDGQ

SEQ ID NO: 50435 - protein, 10 aa, Artificial Sequence
  Description of Artificial Sequence: Synthetic epitope
TGMTTISEMP

SEQ ID NO: 50436 - protein, 10 aa, Artificial Sequence
  Description of Artificial Sequence: Synthetic epitope
TGMYESWVPK

SEQ ID NO: 50437 - protein, 10 aa, Artificial Sequence
  Description of Artificial Sequence: Synthetic epitope
TGNIQSLKNK

SEQ ID NO: 50438 - protein, 10 aa, Artificial Sequence
  Description of Artificial Sequence: Synthetic epitope
TGNLISSLPK

SEQ ID NO: 50439 - protein, 10 aa, Artificial Sequence
  Description of Artificial Sequence: Synthetic epitope
TGNSMTKYTE

SEQ ID NO: 50440 - protein, 10 aa, Artificial Sequence
  Description of Artificial Sequence: Synthetic epitope
TGNVIIETKF

SEQ ID NO: 50441 - protein, 10 aa, Artificial Sequence
  Description of Artificial Sequence: Synthetic epitope
TGPKALAMLM

SEQ ID NO: 50442 - protein, 10 aa, Artificial Sequence
  Description of Artificial Sequence: Synthetic epitope
TGPQNYSPQY

SEQ ID NO: 50443 - protein, 10 aa, Artificial Sequence
  Description of Artificial Sequence: Synthetic epitope
TGPVKRAREE

SEQ ID NO: 50444 - protein, 10 aa, Artificial Sequence
  Description of Artificial Sequence: Synthetic epitope
TGPYSVMPSN

SEQ ID NO: 50445 - protein, 10 aa, Artificial Sequence
  Description of Artificial Sequence: Synthetic epitope
TGQGPNKSQQ

SEQ ID NO: 50446 - protein, 10 aa, Artificial Sequence
  Description of Artificial Sequence: Synthetic epitope
TGQIRFTYAP

SEQ ID NO: 50447 - protein, 10 aa, Artificial Sequence
  Description of Artificial Sequence: Synthetic epitope
TGQKSDLKES

SEQ ID NO: 50448 - protein, 10 aa, Artificial Sequence
  Description of Artificial Sequence: Synthetic epitope
TGQLQSTLGG

SEQ ID NO: 50449 - protein, 10 aa, Artificial Sequence
  Description of Artificial Sequence: Synthetic epitope
TGQQKDTSGV

SEQ ID NO: 50450 - protein, 10 aa, Artificial Sequence
  Description of Artificial Sequence: Synthetic epitope
TGQSIANTIV

SEQ ID NO: 50451 - protein, 10 aa, Artificial Sequence
  Description of Artificial Sequence: Synthetic epitope
TGQTRRLKMD

SEQ ID NO: 50452 - protein, 10 aa, Artificial Sequence
  Description of Artificial Sequence: Synthetic epitope
TGQVSSRSRV

SEQ ID NO: 50453 - protein, 10 aa, Artificial Sequence
  Description of Artificial Sequence: Synthetic epitope
TGQYATTKGI

SEQ ID NO: 50454 - protein, 10 aa, Artificial Sequence
  Description of Artificial Sequence: Synthetic epitope
TGRELKQLIQ

SEQ ID NO: 50455 - protein, 10 aa, Artificial Sequence
  Description of Artificial Sequence: Synthetic epitope
TGRIFESEVR

SEQ ID NO: 50456 - protein, 10 aa, Artificial Sequence
  Description of Artificial Sequence: Synthetic epitope
TGRKELVMLL

SEQ ID NO: 50457 - protein, 10 aa, Artificial Sequence
  Description of Artificial Sequence: Synthetic epitope
TGRKNSSTST

SEQ ID NO: 50458 - protein, 10 aa, Artificial Sequence
  Description of Artificial Sequence: Synthetic epitope
TGRLQVAGVR

SEQ ID NO: 50459 - protein, 10 aa, Artificial Sequence
  Description of Artificial Sequence: Synthetic epitope
TGRNAMNMQE

SEQ ID NO: 50460 - protein, 10 aa, Artificial Sequence
  Description of Artificial Sequence: Synthetic epitope
TGRNVVSEAL

SEQ ID NO: 50461 - protein, 10 aa, Artificial Sequence
  Description of Artificial Sequence: Synthetic epitope
TGRRTRMLPP

SEQ ID NO: 50462 - protein, 10 aa, Artificial Sequence
  Description of Artificial Sequence: Synthetic epitope
TGRRVSFNEA

SEQ ID NO: 50463 - protein, 10 aa, Artificial Sequence
  Description of Artificial Sequence: Synthetic epitope
TGSAENEEKS

SEQ ID NO: 50464 - protein, 10 aa, Artificial Sequence
  Description of Artificial Sequence: Synthetic epitope
TGSEQTTESE

SEQ ID NO: 50465 - protein, 10 aa, Artificial Sequence
  Description of Artificial Sequence: Synthetic epitope
TGSESSQTGT

SEQ ID NO: 50466 - protein, 10 aa, Artificial Sequence
  Description of Artificial Sequence: Synthetic epitope
TGSIQVSSRE

SEQ ID NO: 50467 - protein, 10 aa, Artificial Sequence
  Description of Artificial Sequence: Synthetic epitope
TGSKEKGLTK

SEQ ID NO: 50468 - protein, 10 aa, Artificial Sequence
  Description of Artificial Sequence: Synthetic epitope
TGSKLTIQEH

SEQ ID NO: 50469 - protein, 10 aa, Artificial Sequence
  Description of Artificial Sequence: Synthetic epitope
TGSLAEVEKS

SEQ ID NO: 50470 - protein, 10 aa, Artificial Sequence
  Description of Artificial Sequence: Synthetic epitope
TGSLKKFKDQ

SEQ ID NO: 50471 - protein, 10 aa, Artificial Sequence
  Description of Artificial Sequence: Synthetic epitope
TGSMEVSAES

SEQ ID NO: 50472 - protein, 10 aa, Artificial Sequence
  Description of Artificial Sequence: Synthetic epitope
TGSMTGQIPR

SEQ ID NO: 50473 - protein, 10 aa, Artificial Sequence
  Description of Artificial Sequence: Synthetic epitope
TGSNSEKFSK

SEQ ID NO: 50474 - protein, 10 aa, Artificial Sequence
  Description of Artificial Sequence: Synthetic epitope
TGSNTEESVN

SEQ ID NO: 50475 - protein, 10 aa, Artificial Sequence
  Description of Artificial Sequence: Synthetic epitope
TGSSESLSML

SEQ ID NO: 50476 - protein, 10 aa, Artificial Sequence
  Description of Artificial Sequence: Synthetic epitope
TGSTTDLEAA

SEQ ID NO: 50477 - protein, 10 aa, Artificial Sequence
  Description of Artificial Sequence: Synthetic epitope
TGTAKVLSGT

SEQ ID NO: 50478 - protein, 10 aa, Artificial Sequence
  Description of Artificial Sequence: Synthetic epitope
TGTASSTKPL

SEQ ID NO: 50479 - protein, 10 aa, Artificial Sequence
  Description of Artificial Sequence: Synthetic epitope
TGTETVFEKP

SEQ ID NO: 50480 - protein, 10 aa, Artificial Sequence
  Description of Artificial Sequence: Synthetic epitope
TGTIETTGNI

SEQ ID NO: 50481 - protein, 10 aa, Artificial Sequence
  Description of Artificial Sequence: Synthetic epitope
TGTITEAEET

SEQ ID NO: 50482 - protein, 10 aa, Artificial Sequence
  Description of Artificial Sequence: Synthetic epitope
TGTLEDRAAT

SEQ ID NO: 50483 - protein, 10 aa, Artificial Sequence
  Description of Artificial Sequence: Synthetic epitope
TGTLSVLKVL

SEQ ID NO: 50484 - protein, 10 aa, Artificial Sequence
  Description of Artificial Sequence: Synthetic epitope
TGTMSRHQNQ

SEQ ID NO: 50485 - protein, 10 aa, Artificial Sequence
  Description of Artificial Sequence: Synthetic epitope
TGTNALSAEA

SEQ ID NO: 50486 - protein, 10 aa, Artificial Sequence
  Description of Artificial Sequence: Synthetic epitope
TGTSETEMSA

SEQ ID NO: 50487 - protein, 10 aa, Artificial Sequence
  Description of Artificial Sequence: Synthetic epitope
TGTSGSIMEN

SEQ ID NO: 50488 - protein, 10 aa, Artificial Sequence
  Description of Artificial Sequence: Synthetic epitope
TGTSIRRLTW

SEQ ID NO: 50489 - protein, 10 aa, Artificial Sequence
  Description of Artificial Sequence: Synthetic epitope
TGTTNSITRD

SEQ ID NO: 50490 - protein, 10 aa, Artificial Sequence
  Description of Artificial Sequence: Synthetic epitope
TGVAVVLTEK

SEQ ID NO: 50491 - protein, 10 aa, Artificial Sequence
  Description of Artificial Sequence: Synthetic epitope
TGVDEAKMQS

SEQ ID NO: 50492 - protein, 10 aa, Artificial Sequence
  Description of Artificial Sequence: Synthetic epitope
TGVDKSTDAA

SEQ ID NO: 50493 - protein, 10 aa, Artificial Sequence
  Description of Artificial Sequence: Synthetic epitope
TGVLEAANNS

SEQ ID NO: 50494 - protein, 10 aa, Artificial Sequence
  Description of Artificial Sequence: Synthetic epitope
TGVMETTMQP

SEQ ID NO: 50495 - protein, 10 aa, Artificial Sequence
  Description of Artificial Sequence: Synthetic epitope
TGVSLQTYDD

SEQ ID NO: 50496 - protein, 10 aa, Artificial Sequence
  Description of Artificial Sequence: Synthetic epitope
TGVVEMKDSG

SEQ ID NO: 50497 - protein, 10 aa, Artificial Sequence
  Description of Artificial Sequence: Synthetic epitope
TGVVETAKVY

SEQ ID NO: 50498 - protein, 10 aa, Artificial Sequence
  Description of Artificial Sequence: Synthetic epitope
TGVVEVSETN

SEQ ID NO: 50499 - protein, 10 aa, Artificial Sequence
  Description of Artificial Sequence: Synthetic epitope
TGVVQQIVRA

SEQ ID NO: 50500 - protein, 10 aa, Artificial Sequence
  Description of Artificial Sequence: Synthetic epitope
TGWISTSSIW

SEQ ID NO: 50501 - protein, 10 aa, Artificial Sequence
  Description of Artificial Sequence: Synthetic epitope
TGYHAPMEPP

SEQ ID NO: 50502 - protein, 10 aa, Artificial Sequence
  Description of Artificial Sequence: Synthetic epitope
THALRLVNQE

SEQ ID NO: 50503 - protein, 10 aa, Artificial Sequence
  Description of Artificial Sequence: Synthetic epitope
THAMKFTKAQ

SEQ ID NO: 50504 - protein, 10 aa, Artificial Sequence
  Description of Artificial Sequence: Synthetic epitope
THARVEAGQA

SEQ ID NO: 50505 - protein, 10 aa, Artificial Sequence
  Description of Artificial Sequence: Synthetic epitope
THAVVMYARG

SEQ ID NO: 50506 - protein, 10 aa, Artificial Sequence
  Description of Artificial Sequence: Synthetic epitope
THDLKNIRFT

SEQ ID NO: 50507 - protein, 10 aa, Artificial Sequence
  Description of Artificial Sequence: Synthetic epitope
THDPQVAVDA

SEQ ID NO: 50508 - protein, 10 aa, Artificial Sequence
  Description of Artificial Sequence: Synthetic epitope
THDTEVTREW

SEQ ID NO: 50509 - protein, 10 aa, Artificial Sequence
  Description of Artificial Sequence: Synthetic epitope
THEISVRNSG

SEQ ID NO: 50510 - protein, 10 aa, Artificial Sequence
  Description of Artificial Sequence: Synthetic epitope
THELQAVEEN

SEQ ID NO: 50511 - protein, 10 aa, Artificial Sequence
  Description of Artificial Sequence: Synthetic epitope
THEQLEAYQD

SEQ ID NO: 50512 - protein, 10 aa, Artificial Sequence
  Description of Artificial Sequence: Synthetic epitope
THERKMILDN

SEQ ID NO: 50513 - protein, 10 aa, Artificial Sequence
  Description of Artificial Sequence: Synthetic epitope
THERMQTENK

SEQ ID NO: 50514 - protein, 10 aa, Artificial Sequence
  Description of Artificial Sequence: Synthetic epitope
THFKETQTHE

SEQ ID NO: 50515 - protein, 10 aa, Artificial Sequence
  Description of Artificial Sequence: Synthetic epitope
THGFDKTQAE

SEQ ID NO: 50516 - protein, 10 aa, Artificial Sequence
  Description of Artificial Sequence: Synthetic epitope
THGIAIKSTN

SEQ ID NO: 50517 - protein, 10 aa, Artificial Sequence
  Description of Artificial Sequence: Synthetic epitope
THGQRMPQQT

SEQ ID NO: 50518 - protein, 10 aa, Artificial Sequence
  Description of Artificial Sequence: Synthetic epitope
THGVQNIGQT

SEQ ID NO: 50519 - protein, 10 aa, Artificial Sequence
  Description of Artificial Sequence: Synthetic epitope
THHAENSSGG

SEQ ID NO: 50520 - protein, 10 aa, Artificial Sequence
  Description of Artificial Sequence: Synthetic epitope
THKPFEVEGN

SEQ ID NO: 50521 - protein, 10 aa, Artificial Sequence
  Description of Artificial Sequence: Synthetic epitope
THKSPIERQK

SEQ ID NO: 50522 - protein, 10 aa, Artificial Sequence
  Description of Artificial Sequence: Synthetic epitope
THKVANTSSF

SEQ ID NO: 50523 - protein, 10 aa, Artificial Sequence
  Description of Artificial Sequence: Synthetic epitope
THLAQLQNTE

SEQ ID NO: 50524 - protein, 10 aa, Artificial Sequence
  Description of Artificial Sequence: Synthetic epitope
THLDMTIREH

SEQ ID NO: 50525 - protein, 10 aa, Artificial Sequence
  Description of Artificial Sequence: Synthetic epitope
THLEASFEEV

SEQ ID NO: 50526 - protein, 10 aa, Artificial Sequence
  Description of Artificial Sequence: Synthetic epitope
THLLTVQEPR

SEQ ID NO: 50527 - protein, 10 aa, Artificial Sequence
  Description of Artificial Sequence: Synthetic epitope
THLQSALMST

SEQ ID NO: 50528 - protein, 10 aa, Artificial Sequence
  Description of Artificial Sequence: Synthetic epitope
THLVTKAKVA

SEQ ID NO: 50529 - protein, 10 aa, Artificial Sequence
  Description of Artificial Sequence: Synthetic epitope
THMMKEFPMD

SEQ ID NO: 50530 - protein, 10 aa, Artificial Sequence
  Description of Artificial Sequence: Synthetic epitope
THMTAIVGMA

SEQ ID NO: 50531 - protein, 10 aa, Artificial Sequence
  Description of Artificial Sequence: Synthetic epitope
THNIGQKDNH

SEQ ID NO: 50532 - protein, 10 aa, Artificial Sequence
  Description of Artificial Sequence: Synthetic epitope
THNLLKKQNS

SEQ ID NO: 50533 - protein, 10 aa, Artificial Sequence
  Description of Artificial Sequence: Synthetic epitope
THNSNRHSEE

SEQ ID NO: 50534 - protein, 10 aa, Artificial Sequence
  Description of Artificial Sequence: Synthetic epitope
THPSHTSGQI

SEQ ID NO: 50535 - protein, 10 aa, Artificial Sequence
  Description of Artificial Sequence: Synthetic epitope
THPTVREQIP

SEQ ID NO: 50536 - protein, 10 aa, Artificial Sequence
  Description of Artificial Sequence: Synthetic epitope
THQASKEQKN

SEQ ID NO: 50537 - protein, 10 aa, Artificial Sequence
  Description of Artificial Sequence: Synthetic epitope
THQESAEPKY

SEQ ID NO: 50538 - protein, 10 aa, Artificial Sequence
  Description of Artificial Sequence: Synthetic epitope
THRARRTEIS

SEQ ID NO: 50539 - protein, 10 aa, Artificial Sequence
  Description of Artificial Sequence: Synthetic epitope
THSEASGMVT

SEQ ID NO: 50540 - protein, 10 aa, Artificial Sequence
  Description of Artificial Sequence: Synthetic epitope
THSLQVSEST

SEQ ID NO: 50541 - protein, 10 aa, Artificial Sequence
  Description of Artificial Sequence: Synthetic epitope
THSLSQKSTR

SEQ ID NO: 50542 - protein, 10 aa, Artificial Sequence
  Description of Artificial Sequence: Synthetic epitope
THSQRHAFAE

SEQ ID NO: 50543 - protein, 10 aa, Artificial Sequence
  Description of Artificial Sequence: Synthetic epitope
THSRQTSLTS

SEQ ID NO: 50544 - protein, 10 aa, Artificial Sequence
  Description of Artificial Sequence: Synthetic epitope
THSSGQSFEQ

SEQ ID NO: 50545 - protein, 10 aa, Artificial Sequence
  Description of Artificial Sequence: Synthetic epitope
THSTAQSDST

SEQ ID NO: 50546 - protein, 10 aa, Artificial Sequence
  Description of Artificial Sequence: Synthetic epitope
THSTKSEELN

SEQ ID NO: 50547 - protein, 10 aa, Artificial Sequence
  Description of Artificial Sequence: Synthetic epitope
THTDLASGAA

SEQ ID NO: 50548 - protein, 10 aa, Artificial Sequence
  Description of Artificial Sequence: Synthetic epitope
THTNLELEPK

SEQ ID NO: 50549 - protein, 10 aa, Artificial Sequence
  Description of Artificial Sequence: Synthetic epitope
THTRQDVKQD

SEQ ID NO: 50550 - protein, 10 aa, Artificial Sequence
  Description of Artificial Sequence: Synthetic epitope
THVDINEMES

SEQ ID NO: 50551 - protein, 10 aa, Artificial Sequence
  Description of Artificial Sequence: Synthetic epitope
THVDRLTVDA

SEQ ID NO: 50552 - protein, 10 aa, Artificial Sequence
  Description of Artificial Sequence: Synthetic epitope
THVVSTIPES

SEQ ID NO: 50553 - protein, 10 aa, Artificial Sequence
  Description of Artificial Sequence: Synthetic epitope
THWRDIRNII

SEQ ID NO: 50554 - protein, 10 aa, Artificial Sequence
  Description of Artificial Sequence: Synthetic epitope
THYMSKKELS

SEQ ID NO: 50555 - protein, 10 aa, Artificial Sequence
  Description of Artificial Sequence: Synthetic epitope
THYWTGKMIN

SEQ ID NO: 50556 - protein, 10 aa, Artificial Sequence
  Description of Artificial Sequence: Synthetic epitope
TIADKYSAES

SEQ ID NO: 50557 - protein, 10 aa, Artificial Sequence
  Description of Artificial Sequence: Synthetic epitope
TIAEFALKEE

SEQ ID NO: 50558 - protein, 10 aa, Artificial Sequence
  Description of Artificial Sequence: Synthetic epitope
TIAEPAMIAE

SEQ ID NO: 50559 - protein, 10 aa, Artificial Sequence
  Description of Artificial Sequence: Synthetic epitope
TIAETNNELE

SEQ ID NO: 50560 - protein, 10 aa, Artificial Sequence
  Description of Artificial Sequence: Synthetic epitope
TIAKSLLDLN

SEQ ID NO: 50561 - protein, 10 aa, Artificial Sequence
  Description of Artificial Sequence: Synthetic epitope
TIANAVIGAD

SEQ ID NO: 50562 - protein, 10 aa, Artificial Sequence
  Description of Artificial Sequence: Synthetic epitope
TIAPLAIFEF

SEQ ID NO: 50563 - protein, 10 aa, Artificial Sequence
  Description of Artificial Sequence: Synthetic epitope
TIAQAPSSTE

SEQ ID NO: 50564 - protein, 10 aa, Artificial Sequence
  Description of Artificial Sequence: Synthetic epitope
TIAQMIEDEQ

SEQ ID NO: 50565 - protein, 10 aa, Artificial Sequence
  Description of Artificial Sequence: Synthetic epitope
TIASVSADGI

SEQ ID NO: 50566 - protein, 10 aa, Artificial Sequence
  Description of Artificial Sequence: Synthetic epitope
TIATSHPKSV

SEQ ID NO: 50567 - protein, 10 aa, Artificial Sequence
  Description of Artificial Sequence: Synthetic epitope
TIDAEAYAIG

SEQ ID NO: 50568 - protein, 10 aa, Artificial Sequence
  Description of Artificial Sequence: Synthetic epitope
TIDAKMASSR

SEQ ID NO: 50569 - protein, 10 aa, Artificial Sequence
  Description of Artificial Sequence: Synthetic epitope
TIDPSLDKQT

SEQ ID NO: 50570 - protein, 10 aa, Artificial Sequence
  Description of Artificial Sequence: Synthetic epitope
TIDQPVQIIP

SEQ ID NO: 50571 - protein, 10 aa, Artificial Sequence
  Description of Artificial Sequence: Synthetic epitope
TIEETETQNQ

SEQ ID NO: 50572 - protein, 10 aa, Artificial Sequence
  Description of Artificial Sequence: Synthetic epitope
TIEIGGIYLS

SEQ ID NO: 50573 - protein, 10 aa, Artificial Sequence
  Description of Artificial Sequence: Synthetic epitope
TIEIREKTLA

SEQ ID NO: 50574 - protein, 10 aa, Artificial Sequence
  Description of Artificial Sequence: Synthetic epitope
TIETTVVGEE

SEQ ID NO: 50575 - protein, 10 aa, Artificial Sequence
  Description of Artificial Sequence: Synthetic epitope
TIEWFEVISQ

SEQ ID NO: 50576 - protein, 10 aa, Artificial Sequence
  Description of Artificial Sequence: Synthetic epitope
TIFASTLRSI

SEQ ID NO: 50577 - protein, 10 aa, Artificial Sequence
  Description of Artificial Sequence: Synthetic epitope
TIGLLSSTGP

SEQ ID NO: 50578 - protein, 10 aa, Artificial Sequence
  Description of Artificial Sequence: Synthetic epitope
TIGRVAQTHV

SEQ ID NO: 50579 - protein, 10 aa, Artificial Sequence
  Description of Artificial Sequence: Synthetic epitope
TIHDKTEINL

SEQ ID NO: 50580 - protein, 10 aa, Artificial Sequence
  Description of Artificial Sequence: Synthetic epitope
TIHFMITSTY

SEQ ID NO: 50581 - protein, 10 aa, Artificial Sequence
  Description of Artificial Sequence: Synthetic epitope
TIHKSATTLS

SEQ ID NO: 50582 - protein, 10 aa, Artificial Sequence
  Description of Artificial Sequence: Synthetic epitope
TIHSTSTSPQ

SEQ ID NO: 50583 - protein, 10 aa, Artificial Sequence
  Description of Artificial Sequence: Synthetic epitope
TIIESIREED

SEQ ID NO: 50584 - protein, 10 aa, Artificial Sequence
  Description of Artificial Sequence: Synthetic epitope
TIIKQVSQAQ

SEQ ID NO: 50585 - protein, 10 aa, Artificial Sequence
  Description of Artificial Sequence: Synthetic epitope
TIILSAEELS

SEQ ID NO: 50586 - protein, 10 aa, Artificial Sequence
  Description of Artificial Sequence: Synthetic epitope
TIINSKQMGS

SEQ ID NO: 50587 - protein, 10 aa, Artificial Sequence
  Description of Artificial Sequence: Synthetic epitope
TIISATGASA

SEQ ID NO: 50588 - protein, 10 aa, Artificial Sequence
  Description of Artificial Sequence: Synthetic epitope
TIISVTLEIH

SEQ ID NO: 50589 - protein, 10 aa, Artificial Sequence
  Description of Artificial Sequence: Synthetic epitope
TIKIAILNFD

SEQ ID NO: 50590 - protein, 10 aa, Artificial Sequence
  Description of Artificial Sequence: Synthetic epitope
TIKLGLVLQP

SEQ ID NO: 50591 - protein, 10 aa, Artificial Sequence
  Description of Artificial Sequence: Synthetic epitope
TIKSPKNNEK

SEQ ID NO: 50592 - protein, 10 aa, Artificial Sequence
  Description of Artificial Sequence: Synthetic epitope
TIKTNSLNGT

SEQ ID NO: 50593 - protein, 10 aa, Artificial Sequence
  Description of Artificial Sequence: Synthetic epitope
TIKVTVATNQ

SEQ ID NO: 50594 - protein, 10 aa, Artificial Sequence
  Description of Artificial Sequence: Synthetic epitope
TILAQLSDMD

SEQ ID NO: 50595 - protein, 10 aa, Artificial Sequence
  Description of Artificial Sequence: Synthetic epitope
TILERTVTTR

SEQ ID NO: 50596 - protein, 10 aa, Artificial Sequence
  Description of Artificial Sequence: Synthetic epitope
TILGQNQYQA

SEQ ID NO: 50597 - protein, 10 aa, Artificial Sequence
  Description of Artificial Sequence: Synthetic epitope
TILRTSSKST

SEQ ID NO: 50598 - protein, 10 aa, Artificial Sequence
  Description of Artificial Sequence: Synthetic epitope
TILSSAQGLK

SEQ ID NO: 50599 - protein, 10 aa, Artificial Sequence
  Description of Artificial Sequence: Synthetic epitope
TIMRLASEVN

SEQ ID NO: 50600 - protein, 10 aa, Artificial Sequence
  Description of Artificial Sequence: Synthetic epitope
TINGGTKAKQ

SEQ ID NO: 50601 - protein, 10 aa, Artificial Sequence
  Description of Artificial Sequence: Synthetic epitope
TINHIPDISP

SEQ ID NO: 50602 - protein, 10 aa, Artificial Sequence
  Description of Artificial Sequence: Synthetic epitope
TINHKIEDQM

SEQ ID NO: 50603 - protein, 10 aa, Artificial Sequence
  Description of Artificial Sequence: Synthetic epitope
TININPSDTT

SEQ ID NO: 50604 - protein, 10 aa, Artificial Sequence
  Description of Artificial Sequence: Synthetic epitope
TINNSSLSQV

SEQ ID NO: 50605 - protein, 10 aa, Artificial Sequence
  Description of Artificial Sequence: Synthetic epitope
TINVATLASS

SEQ ID NO: 50606 - protein, 10 aa, Artificial Sequence
  Description of Artificial Sequence: Synthetic epitope
TINVSVKSGS

SEQ ID NO: 50607 - protein, 10 aa, Artificial Sequence
  Description of Artificial Sequence: Synthetic epitope
TIPEAEKSPL

SEQ ID NO: 50608 - protein, 10 aa, Artificial Sequence
  Description of Artificial Sequence: Synthetic epitope
TIPFKNRYKY

SEQ ID NO: 50609 - protein, 10 aa, Artificial Sequence
  Description of Artificial Sequence: Synthetic epitope
TIPKSLSEKR

SEQ ID NO: 50610 - protein, 10 aa, Artificial Sequence
  Description of Artificial Sequence: Synthetic epitope
TIPLPFAYWN

SEQ ID NO: 50611 - protein, 10 aa, Artificial Sequence
  Description of Artificial Sequence: Synthetic epitope
TIPNSQIQEP

SEQ ID NO: 50612 - protein, 10 aa, Artificial Sequence
  Description of Artificial Sequence: Synthetic epitope
TIPSQLKPLS

SEQ ID NO: 50613 - protein, 10 aa, Artificial Sequence
  Description of Artificial Sequence: Synthetic epitope
TIPSVEVEKI

SEQ ID NO: 50614 - protein, 10 aa, Artificial Sequence
  Description of Artificial Sequence: Synthetic epitope
TIQARAEQEE

SEQ ID NO: 50615 - protein, 10 aa, Artificial Sequence
  Description of Artificial Sequence: Synthetic epitope
TIQASRLKTE

SEQ ID NO: 50616 - protein, 10 aa, Artificial Sequence
  Description of Artificial Sequence: Synthetic epitope
TIQKKMIDAG

SEQ ID NO: 50617 - protein, 10 aa, Artificial Sequence
  Description of Artificial Sequence: Synthetic epitope
TIQNLRFNTE

SEQ ID NO: 50618 - protein, 10 aa, Artificial Sequence
  Description of Artificial Sequence: Synthetic epitope
TIQSFEQVGT

SEQ ID NO: 50619 - protein, 10 aa, Artificial Sequence
  Description of Artificial Sequence: Synthetic epitope
TIQSIAASSI

SEQ ID NO: 50620 - protein, 10 aa, Artificial Sequence
  Description of Artificial Sequence: Synthetic epitope
TIRETSQTST

SEQ ID NO: 50621 - protein, 10 aa, Artificial Sequence
  Description of Artificial Sequence: Synthetic epitope
TIRIQNSQLQ

SEQ ID NO: 50622 - protein, 10 aa, Artificial Sequence
  Description of Artificial Sequence: Synthetic epitope
TIRISITSER

SEQ ID NO: 50623 - protein, 10 aa, Artificial Sequence
  Description of Artificial Sequence: Synthetic epitope
TIRKVSVFSK

SEQ ID NO: 50624 - protein, 10 aa, Artificial Sequence
  Description of Artificial Sequence: Synthetic epitope
TIRRTVLEEI

SEQ ID NO: 50625 - protein, 10 aa, Artificial Sequence
  Description of Artificial Sequence: Synthetic epitope
TIRVPLTSLK

SEQ ID NO: 50626 - protein, 10 aa, Artificial Sequence
  Description of Artificial Sequence: Synthetic epitope
TISALAIAAL

SEQ ID NO: 50627 - protein, 10 aa, Artificial Sequence
  Description of Artificial Sequence: Synthetic epitope
TISEAIVAEE

SEQ ID NO: 50628 - protein, 10 aa, Artificial Sequence
  Description of Artificial Sequence: Synthetic epitope
TISEKVLTKE

SEQ ID NO: 50629 - protein, 10 aa, Artificial Sequence
  Description of Artificial Sequence: Synthetic epitope
TISELNTTSG

SEQ ID NO: 50630 - protein, 10 aa, Artificial Sequence
  Description of Artificial Sequence: Synthetic epitope
TISEQAVKAS

SEQ ID NO: 50631 - protein, 10 aa, Artificial Sequence
  Description of Artificial Sequence: Synthetic epitope
TISESAANLT

SEQ ID NO: 50632 - protein, 10 aa, Artificial Sequence
  Description of Artificial Sequence: Synthetic epitope
TISGDNIGKN

SEQ ID NO: 50633 - protein, 10 aa, Artificial Sequence
  Description of Artificial Sequence: Synthetic epitope
TISKYVERTE

SEQ ID NO: 50634 - protein, 10 aa, Artificial Sequence
  Description of Artificial Sequence: Synthetic epitope
TISLKESKSR

SEQ ID NO: 50635 - protein, 10 aa, Artificial Sequence
  Description of Artificial Sequence: Synthetic epitope
TISMNYVIGT

SEQ ID NO: 50636 - protein, 10 aa, Artificial Sequence
  Description of Artificial Sequence: Synthetic epitope
TISQKSVDIH

SEQ ID NO: 50637 - protein, 10 aa, Artificial Sequence
  Description of Artificial Sequence: Synthetic epitope
TISSLSKAVQ

SEQ ID NO: 50638 - protein, 10 aa, Artificial Sequence
  Description of Artificial Sequence: Synthetic epitope
TISSVSVVGD

SEQ ID NO: 50639 - protein, 10 aa, Artificial Sequence
  Description of Artificial Sequence: Synthetic epitope
TISTAITASS

SEQ ID NO: 50640 - protein, 10 aa, Artificial Sequence
  Description of Artificial Sequence: Synthetic epitope
TISTASMVEK

SEQ ID NO: 50641 - protein, 10 aa, Artificial Sequence
  Description of Artificial Sequence: Synthetic epitope
TISTDEEKSA

SEQ ID NO: 50642 - protein, 10 aa, Artificial Sequence
  Description of Artificial Sequence: Synthetic epitope
TISTDLTFSV

SEQ ID NO: 50643 - protein, 10 aa, Artificial Sequence
  Description of Artificial Sequence: Synthetic epitope
TISTKILDSN

SEQ ID NO: 50644 - protein, 10 aa, Artificial Sequence
  Description of Artificial Sequence: Synthetic epitope
TISTLETPQD

SEQ ID NO: 50645 - protein, 10 aa, Artificial Sequence
  Description of Artificial Sequence: Synthetic epitope
TISVDRPVKK

SEQ ID NO: 50646 - protein, 10 aa, Artificial Sequence
  Description of Artificial Sequence: Synthetic epitope
TISVSGSTAK

SEQ ID NO: 50647 - protein, 10 aa, Artificial Sequence
  Description of Artificial Sequence: Synthetic epitope
TISVSVITEG

SEQ ID NO: 50648 - protein, 10 aa, Artificial Sequence
  Description of Artificial Sequence: Synthetic epitope
TISVTSFHSQ

SEQ ID NO: 50649 - protein, 10 aa, Artificial Sequence
  Description of Artificial Sequence: Synthetic epitope
TITASQVVDS

SEQ ID NO: 50650 - protein, 10 aa, Artificial Sequence
  Description of Artificial Sequence: Synthetic epitope
TITDDVRVQE

SEQ ID NO: 50651 - protein, 10 aa, Artificial Sequence
  Description of Artificial Sequence: Synthetic epitope
TITGSESASP

SEQ ID NO: 50652 - protein, 10 aa, Artificial Sequence
  Description of Artificial Sequence: Synthetic epitope
TITLQQAEYE

SEQ ID NO: 50653 - protein, 10 aa, Artificial Sequence
  Description of Artificial Sequence: Synthetic epitope
TITPPAHTTG

SEQ ID NO: 50654 - protein, 10 aa, Artificial Sequence
  Description of Artificial Sequence: Synthetic epitope
TITQKALQSQ

SEQ ID NO: 50655 - protein, 10 aa, Artificial Sequence
  Description of Artificial Sequence: Synthetic epitope
TITRIYRGYN

SEQ ID NO: 50656 - protein, 10 aa, Artificial Sequence
  Description of Artificial Sequence: Synthetic epitope
TITSDYSTTS

SEQ ID NO: 50657 - protein, 10 aa, Artificial Sequence
  Description of Artificial Sequence: Synthetic epitope
TIVDISRKIN

SEQ ID NO: 50658 - protein, 10 aa, Artificial Sequence
  Description of Artificial Sequence: Synthetic epitope
TIVDTVASEM

SEQ ID NO: 50659 - protein, 10 aa, Artificial Sequence
  Description of Artificial Sequence: Synthetic epitope
TIVEMLHKAE

SEQ ID NO: 50660 - protein, 10 aa, Artificial Sequence
  Description of Artificial Sequence: Synthetic epitope
TIVKAVEFLL

SEQ ID NO: 50661 - protein, 10 aa, Artificial Sequence
  Description of Artificial Sequence: Synthetic epitope
TIVKSHLLQK

SEQ ID NO: 50662 - protein, 10 aa, Artificial Sequence
  Description of Artificial Sequence: Synthetic epitope
TIVLRTDSEK

SEQ ID NO: 50663 - protein, 10 aa, Artificial Sequence
  Description of Artificial Sequence: Synthetic epitope
TIVSTESLET

SEQ ID NO: 50664 - protein, 10 aa, Artificial Sequence
  Description of Artificial Sequence: Synthetic epitope
TIYNAAIQKA

SEQ ID NO: 50665 - protein, 10 aa, Artificial Sequence
  Description of Artificial Sequence: Synthetic epitope
TKAAIVADER

SEQ ID NO: 50666 - protein, 10 aa, Artificial Sequence
  Description of Artificial Sequence: Synthetic epitope
TKAARPLISS

SEQ ID NO: 50667 - protein, 10 aa, Artificial Sequence
  Description of Artificial Sequence: Synthetic epitope
TKADSNTTVK

SEQ ID NO: 50668 - protein, 10 aa, Artificial Sequence
  Description of Artificial Sequence: Synthetic epitope
TKADSTSDVK

SEQ ID NO: 50669 - protein, 10 aa, Artificial Sequence
  Description of Artificial Sequence: Synthetic epitope
TKAEARRSAA

SEQ ID NO: 50670 - protein, 10 aa, Artificial Sequence
  Description of Artificial Sequence: Synthetic epitope
TKAFEFLNHS

SEQ ID NO: 50671 - protein, 10 aa, Artificial Sequence
  Description of Artificial Sequence: Synthetic epitope
TKAFNALKEL

SEQ ID NO: 50672 - protein, 10 aa, Artificial Sequence
  Description of Artificial Sequence: Synthetic epitope
TKAGVLARYG

SEQ ID NO: 50673 - protein, 10 aa, Artificial Sequence
  Description of Artificial Sequence: Synthetic epitope
TKAIDDSSAS

SEQ ID NO: 50674 - protein, 10 aa, Artificial Sequence
  Description of Artificial Sequence: Synthetic epitope
TKAKMTPTKK

SEQ ID NO: 50675 - protein, 10 aa, Artificial Sequence
  Description of Artificial Sequence: Synthetic epitope
TKALEDSSFL

SEQ ID NO: 50676 - protein, 10 aa, Artificial Sequence
  Description of Artificial Sequence: Synthetic epitope
TKALSMLTEA

SEQ ID NO: 50677 - protein, 10 aa, Artificial Sequence
  Description of Artificial Sequence: Synthetic epitope
TKALSSLELS

SEQ ID NO: 50678 - protein, 10 aa, Artificial Sequence
  Description of Artificial Sequence: Synthetic epitope
TKANKVPDSV

SEQ ID NO: 50679 - protein, 10 aa, Artificial Sequence
  Description of Artificial Sequence: Synthetic epitope
TKANNRVADE

SEQ ID NO: 50680 - protein, 10 aa, Artificial Sequence
  Description of Artificial Sequence: Synthetic epitope
TKAPAKQLAQ

SEQ ID NO: 50681 - protein, 10 aa, Artificial Sequence
  Description of Artificial Sequence: Synthetic epitope
TKAPSGRPNV

SEQ ID NO: 50682 - protein, 10 aa, Artificial Sequence
  Description of Artificial Sequence: Synthetic epitope
TKAQSLAAEI

SEQ ID NO: 50683 - protein, 10 aa, Artificial Sequence
  Description of Artificial Sequence: Synthetic epitope
TKARQLNDAS

SEQ ID NO: 50684 - protein, 10 aa, Artificial Sequence
  Description of Artificial Sequence: Synthetic epitope
TKASLVEEDE

SEQ ID NO: 50685 - protein, 10 aa, Artificial Sequence
  Description of Artificial Sequence: Synthetic epitope
TKASRKRLTV

SEQ ID NO: 50686 - protein, 10 aa, Artificial Sequence
  Description of Artificial Sequence: Synthetic epitope
TKATSKPMGG

SEQ ID NO: 50687 - protein, 10 aa, Artificial Sequence
  Description of Artificial Sequence: Synthetic epitope
TKAVKESTIT

SEQ ID NO: 50688 - protein, 10 aa, Artificial Sequence
  Description of Artificial Sequence: Synthetic epitope
TKAVSSEVDE

SEQ ID NO: 50689 - protein, 10 aa, Artificial Sequence
  Description of Artificial Sequence: Synthetic epitope
TKDASSALAS

SEQ ID NO: 50690 - protein, 10 aa, Artificial Sequence
  Description of Artificial Sequence: Synthetic epitope
TKDATKEALH

SEQ ID NO: 50691 - protein, 10 aa, Artificial Sequence
  Description of Artificial Sequence: Synthetic epitope
TKDLKTEKKN

SEQ ID NO: 50692 - protein, 10 aa, Artificial Sequence
  Description of Artificial Sequence: Synthetic epitope
TKDQLSSRSE

SEQ ID NO: 50693 - protein, 10 aa, Artificial Sequence
  Description of Artificial Sequence: Synthetic epitope
TKDSEFISAS

SEQ ID NO: 50694 - protein, 10 aa, Artificial Sequence
  Description of Artificial Sequence: Synthetic epitope
TKDSKSIAQV

SEQ ID NO: 50695 - protein, 10 aa, Artificial Sequence
  Description of Artificial Sequence: Synthetic epitope
TKDSMNIKAH

SEQ ID NO: 50696 - protein, 10 aa, Artificial Sequence
  Description of Artificial Sequence: Synthetic epitope
TKEASITFPF

SEQ ID NO: 50697 - protein, 10 aa, Artificial Sequence
  Description of Artificial Sequence: Synthetic epitope
TKEATTSKHI

SEQ ID NO: 50698 - protein, 10 aa, Artificial Sequence
  Description of Artificial Sequence: Synthetic epitope
TKEDKASSES

SEQ ID NO: 50699 - protein, 10 aa, Artificial Sequence
  Description of Artificial Sequence: Synthetic epitope
TKEERSSQDH

SEQ ID NO: 50700 - protein, 10 aa, Artificial Sequence
  Description of Artificial Sequence: Synthetic epitope
TKEKAAGFHK

SEQ ID NO: 50701 - protein, 10 aa, Artificial Sequence
  Description of Artificial Sequence: Synthetic epitope
TKEKAKGIQA

SEQ ID NO: 50702 - protein, 10 aa, Artificial Sequence
  Description of Artificial Sequence: Synthetic epitope
TKEKEKLGLV

SEQ ID NO: 50703 - protein, 10 aa, Artificial Sequence
  Description of Artificial Sequence: Synthetic epitope
TKEKGAITAK

SEQ ID NO: 50704 - protein, 10 aa, Artificial Sequence
  Description of Artificial Sequence: Synthetic epitope
TKENEQIKED

SEQ ID NO: 50705 - protein, 10 aa, Artificial Sequence
  Description of Artificial Sequence: Synthetic epitope
TKENLMKMQS

SEQ ID NO: 50706 - protein, 10 aa, Artificial Sequence
  Description of Artificial Sequence: Synthetic epitope
TKEQEDDLTS

SEQ ID NO: 50707 - protein, 10 aa, Artificial Sequence
  Description of Artificial Sequence: Synthetic epitope
TKESNVQEVR

SEQ ID NO: 50708 - protein, 10 aa, Artificial Sequence
  Description of Artificial Sequence: Synthetic epitope
TKESNVQEVR

SEQ ID NO: 50709 - protein, 10 aa, Artificial Sequence
  Description of Artificial Sequence: Synthetic epitope
TKESRDAKAQ

SEQ ID NO: 50710 - protein, 10 aa, Artificial Sequence
  Description of Artificial Sequence: Synthetic epitope
TKESTDIEKA

SEQ ID NO: 50711 - protein, 10 aa, Artificial Sequence
  Description of Artificial Sequence: Synthetic epitope
TKETLETQET

SEQ ID NO: 50712 - protein, 10 aa, Artificial Sequence
  Description of Artificial Sequence: Synthetic epitope
TKETTQKNFN

SEQ ID NO: 50713 - protein, 10 aa, Artificial Sequence
  Description of Artificial Sequence: Synthetic epitope
TKEVDATSKE

SEQ ID NO: 50714 - protein, 10 aa, Artificial Sequence
  Description of Artificial Sequence: Synthetic epitope
TKFEPRAETQ

SEQ ID NO: 50715 - protein, 10 aa, Artificial Sequence
  Description of Artificial Sequence: Synthetic epitope
TKFKAQAKLF

SEQ ID NO: 50716 - protein, 10 aa, Artificial Sequence
  Description of Artificial Sequence: Synthetic epitope
TKFKELNTKV

SEQ ID NO: 50717 - protein, 10 aa, Artificial Sequence
  Description of Artificial Sequence: Synthetic epitope
TKFLQEQRMA

SEQ ID NO: 50718 - protein, 10 aa, Artificial Sequence
  Description of Artificial Sequence: Synthetic epitope
TKFLQYESKK

SEQ ID NO: 50719 - protein, 10 aa, Artificial Sequence
  Description of Artificial Sequence: Synthetic epitope
TKFRHHMYTN

SEQ ID NO: 50720 - protein, 10 aa, Artificial Sequence
  Description of Artificial Sequence: Synthetic epitope
TKFTKKSEER

SEQ ID NO: 50721 - protein, 10 aa, Artificial Sequence
  Description of Artificial Sequence: Synthetic epitope
TKFVSETDTS

SEQ ID NO: 50722 - protein, 10 aa, Artificial Sequence
  Description of Artificial Sequence: Synthetic epitope
TKGAEMETQR

SEQ ID NO: 50723 - protein, 10 aa, Artificial Sequence
  Description of Artificial Sequence: Synthetic epitope
TKGIKEKQSN

SEQ ID NO: 50724 - protein, 10 aa, Artificial Sequence
  Description of Artificial Sequence: Synthetic epitope
TKGKAKSKVH

SEQ ID NO: 50725 - protein, 10 aa, Artificial Sequence
  Description of Artificial Sequence: Synthetic epitope
TKGMMAGAEK

SEQ ID NO: 50726 - protein, 10 aa, Artificial Sequence
  Description of Artificial Sequence: Synthetic epitope
TKGNLGTIPT

SEQ ID NO: 50727 - protein, 10 aa, Artificial Sequence
  Description of Artificial Sequence: Synthetic epitope
TKGSAIQAKL

SEQ ID NO: 50728 - protein, 10 aa, Artificial Sequence
  Description of Artificial Sequence: Synthetic epitope
TKGSTSKPSS

SEQ ID NO: 50729 - protein, 10 aa, Artificial Sequence
  Description of Artificial Sequence: Synthetic epitope
TKGVIVERSG

SEQ ID NO: 50730 - protein, 10 aa, Artificial Sequence
  Description of Artificial Sequence: Synthetic epitope
TKHMILIKDQ

SEQ ID NO: 50731 - protein, 10 aa, Artificial Sequence
  Description of Artificial Sequence: Synthetic epitope
TKHRNTRYYS

SEQ ID NO: 50732 - protein, 10 aa, Artificial Sequence
  Description of Artificial Sequence: Synthetic epitope
TKHSTSETEQ

SEQ ID NO: 50733 - protein, 10 aa, Artificial Sequence
  Description of Artificial Sequence: Synthetic epitope
TKHSVIPHQK

SEQ ID NO: 50734 - protein, 10 aa, Artificial Sequence
  Description of Artificial Sequence: Synthetic epitope
TKHSVIPHQK

SEQ ID NO: 50735 - protein, 10 aa, Artificial Sequence
  Description of Artificial Sequence: Synthetic epitope
TKIEITMRKA

SEQ ID NO: 50736 - protein, 10 aa, Artificial Sequence
  Description of Artificial Sequence: Synthetic epitope
TKIELTLTEL

SEQ ID NO: 50737 - protein, 10 aa, Artificial Sequence
  Description of Artificial Sequence: Synthetic epitope
TKIFNNVSKE

SEQ ID NO: 50738 - protein, 10 aa, Artificial Sequence
  Description of Artificial Sequence: Synthetic epitope
TKIKRELLGN

SEQ ID NO: 50739 - protein, 10 aa, Artificial Sequence
  Description of Artificial Sequence: Synthetic epitope
TKIMKTIVDD

SEQ ID NO: 50740 - protein, 10 aa, Artificial Sequence
  Description of Artificial Sequence: Synthetic epitope
TKIQIGADKT

SEQ ID NO: 50741 - protein, 10 aa, Artificial Sequence
  Description of Artificial Sequence: Synthetic epitope
TKIQTLTSSV

SEQ ID NO: 50742 - protein, 10 aa, Artificial Sequence
  Description of Artificial Sequence: Synthetic epitope
TKIRADKIEK

SEQ ID NO: 50743 - protein, 10 aa, Artificial Sequence
  Description of Artificial Sequence: Synthetic epitope
TKITEGTTQE

SEQ ID NO: 50744 - protein, 10 aa, Artificial Sequence
  Description of Artificial Sequence: Synthetic epitope
TKIYDKTEKP

SEQ ID NO: 50745 - protein, 10 aa, Artificial Sequence
  Description of Artificial Sequence: Synthetic epitope
TKKATTSLES

SEQ ID NO: 50746 - protein, 10 aa, Artificial Sequence
  Description of Artificial Sequence: Synthetic epitope
TKKEEQNKSH

SEQ ID NO: 50747 - protein, 10 aa, Artificial Sequence
  Description of Artificial Sequence: Synthetic epitope
TKKERNSTIA

SEQ ID NO: 50748 - protein, 10 aa, Artificial Sequence
  Description of Artificial Sequence: Synthetic epitope
TKKETSAVAE

SEQ ID NO: 50749 - protein, 10 aa, Artificial Sequence
  Description of Artificial Sequence: Synthetic epitope
TKKGNEAVAS

SEQ ID NO: 50750 - protein, 10 aa, Artificial Sequence
  Description of Artificial Sequence: Synthetic epitope
TKKIIESDQE

SEQ ID NO: 50751 - protein, 10 aa, Artificial Sequence
  Description of Artificial Sequence: Synthetic epitope
TKKITESVAE

SEQ ID NO: 50752 - protein, 10 aa, Artificial Sequence
  Description of Artificial Sequence: Synthetic epitope
TKKLQTRERE

SEQ ID NO: 50753 - protein, 10 aa, Artificial Sequence
  Description of Artificial Sequence: Synthetic epitope
TKKMDKTIPE

SEQ ID NO: 50754 - protein, 10 aa, Artificial Sequence
  Description of Artificial Sequence: Synthetic epitope
TKKPIFQANQ

SEQ ID NO: 50755 - protein, 10 aa, Artificial Sequence
  Description of Artificial Sequence: Synthetic epitope
TKKPLILKRK

SEQ ID NO: 50756 - protein, 10 aa, Artificial Sequence
  Description of Artificial Sequence: Synthetic epitope
TKKRVSFSEQ

SEQ ID NO: 50757 - protein, 10 aa, Artificial Sequence
  Description of Artificial Sequence: Synthetic epitope
TKKSDDKNSE

SEQ ID NO: 50758 - protein, 10 aa, Artificial Sequence
  Description of Artificial Sequence: Synthetic epitope
TKKSSQRLKD

SEQ ID NO: 50759 - protein, 10 aa, Artificial Sequence
  Description of Artificial Sequence: Synthetic epitope
TKKSTKQEVA

SEQ ID NO: 50760 - protein, 10 aa, Artificial Sequence
  Description of Artificial Sequence: Synthetic epitope
TKKSTKTINP

SEQ ID NO: 50761 - protein, 10 aa, Artificial Sequence
  Description of Artificial Sequence: Synthetic epitope
TKKTIGSLQA

SEQ ID NO: 50762 - protein, 10 aa, Artificial Sequence
  Description of Artificial Sequence: Synthetic epitope
TKKTQAASVE

SEQ ID NO: 50763 - protein, 10 aa, Artificial Sequence
  Description of Artificial Sequence: Synthetic epitope
TKKVVASPRI

SEQ ID NO: 50764 - protein, 10 aa, Artificial Sequence
  Description of Artificial Sequence: Synthetic epitope
TKLAKIRKPT

SEQ ID NO: 50765 - protein, 10 aa, Artificial Sequence
  Description of Artificial Sequence: Synthetic epitope
TKLAVRQKAS

SEQ ID NO: 50766 - protein, 10 aa, Artificial Sequence
  Description of Artificial Sequence: Synthetic epitope
TKLFQLTEKS

SEQ ID NO: 50767 - protein, 10 aa, Artificial Sequence
  Description of Artificial Sequence: Synthetic epitope
TKLGQFRVKE

SEQ ID NO: 50768 - protein, 10 aa, Artificial Sequence
  Description of Artificial Sequence: Synthetic epitope
TKLIAMKTEK

SEQ ID NO: 50769 - protein, 10 aa, Artificial Sequence
  Description of Artificial Sequence: Synthetic epitope
TKLKSRVATF

SEQ ID NO: 50770 - protein, 10 aa, Artificial Sequence
  Description of Artificial Sequence: Synthetic epitope
TKLKSRVATF

SEQ ID NO: 50771 - protein, 10 aa, Artificial Sequence
  Description of Artificial Sequence: Synthetic epitope
TKLKTDLEKK

SEQ ID NO: 50772 - protein, 10 aa, Artificial Sequence
  Description of Artificial Sequence: Synthetic epitope
TKLNSSKSAS

SEQ ID NO: 50773 - protein, 10 aa, Artificial Sequence
  Description of Artificial Sequence: Synthetic epitope
TKLQGSVQPS

SEQ ID NO: 50774 - protein, 10 aa, Artificial Sequence
  Description of Artificial Sequence: Synthetic epitope
TKLQLSKNVL

SEQ ID NO: 50775 - protein, 10 aa, Artificial Sequence
  Description of Artificial Sequence: Synthetic epitope
TKLSAEPTEV

SEQ ID NO: 50776 - protein, 10 aa, Artificial Sequence
  Description of Artificial Sequence: Synthetic epitope
TKLSEAVGAA

SEQ ID NO: 50777 - protein, 10 aa, Artificial Sequence
  Description of Artificial Sequence: Synthetic epitope
TKLSEKSNSQ

SEQ ID NO: 50778 - protein, 10 aa, Artificial Sequence
  Description of Artificial Sequence: Synthetic epitope
TKLSKYQAST

SEQ ID NO: 50779 - protein, 10 aa, Artificial Sequence
  Description of Artificial Sequence: Synthetic epitope
TKLTLNAKSI

SEQ ID NO: 50780 - protein, 10 aa, Artificial Sequence
  Description of Artificial Sequence: Synthetic epitope
TKMAKEGAAE

SEQ ID NO: 50781 - protein, 10 aa, Artificial Sequence
  Description of Artificial Sequence: Synthetic epitope
TKMKTKLRTN

SEQ ID NO: 50782 - protein, 10 aa, Artificial Sequence
  Description of Artificial Sequence: Synthetic epitope
TKMLATAPAR

SEQ ID NO: 50783 - protein, 10 aa, Artificial Sequence
  Description of Artificial Sequence: Synthetic epitope
TKMLNAFQNS

SEQ ID NO: 50784 - protein, 10 aa, Artificial Sequence
  Description of Artificial Sequence: Synthetic epitope
TKMMEVDVRA

SEQ ID NO: 50785 - protein, 10 aa, Artificial Sequence
  Description of Artificial Sequence: Synthetic epitope
TKMQLQREAE

SEQ ID NO: 50786 - protein, 10 aa, Artificial Sequence
  Description of Artificial Sequence: Synthetic epitope
TKMRKQASEK

SEQ ID NO: 50787 - protein, 10 aa, Artificial Sequence
  Description of Artificial Sequence: Synthetic epitope
TKMSSHHLSH

SEQ ID NO: 50788 - protein, 10 aa, Artificial Sequence
  Description of Artificial Sequence: Synthetic epitope
TKMSSTLSKV

SEQ ID NO: 50789 - protein, 10 aa, Artificial Sequence
  Description of Artificial Sequence: Synthetic epitope
TKNENVATLS

SEQ ID NO: 50790 - protein, 10 aa, Artificial Sequence
  Description of Artificial Sequence: Synthetic epitope
TKNETIAQED

SEQ ID NO: 50791 - protein, 10 aa, Artificial Sequence
  Description of Artificial Sequence: Synthetic epitope
TKNEVSKPAE

SEQ ID NO: 50792 - protein, 10 aa, Artificial Sequence
  Description of Artificial Sequence: Synthetic epitope
TKNFDLQQHI

SEQ ID NO: 50793 - protein, 10 aa, Artificial Sequence
  Description of Artificial Sequence: Synthetic epitope
TKNHAIFSED

SEQ ID NO: 50794 - protein, 10 aa, Artificial Sequence
  Description of Artificial Sequence: Synthetic epitope
TKNHSQEETS

SEQ ID NO: 50795 - protein, 10 aa, Artificial Sequence
  Description of Artificial Sequence: Synthetic epitope
TKNKELTDEF

SEQ ID NO: 50796 - protein, 10 aa, Artificial Sequence
  Description of Artificial Sequence: Synthetic epitope
TKNKSSNHPE

SEQ ID NO: 50797 - protein, 10 aa, Artificial Sequence
  Description of Artificial Sequence: Synthetic epitope
TKNLQKVRTS

SEQ ID NO: 50798 - protein, 10 aa, Artificial Sequence
  Description of Artificial Sequence: Synthetic epitope
TKNLSAGSGK

SEQ ID NO: 50799 - protein, 10 aa, Artificial Sequence
  Description of Artificial Sequence: Synthetic epitope
TKNSDAKIAV

SEQ ID NO: 50800 - protein, 10 aa, Artificial Sequence
  Description of Artificial Sequence: Synthetic epitope
TKNSVVSTTS

SEQ ID NO: 50801 - protein, 10 aa, Artificial Sequence
  Description of Artificial Sequence: Synthetic epitope
TKNTTVTEQN

SEQ ID NO: 50802 - protein, 10 aa, Artificial Sequence
  Description of Artificial Sequence: Synthetic epitope
TKPEEKMFDS

SEQ ID NO: 50803 - protein, 10 aa, Artificial Sequence
  Description of Artificial Sequence: Synthetic epitope
TKPEGIMQIP

SEQ ID NO: 50804 - protein, 10 aa, Artificial Sequence
  Description of Artificial Sequence: Synthetic epitope
TKPKMQSLVQ

SEQ ID NO: 50805 - protein, 10 aa, Artificial Sequence
  Description of Artificial Sequence: Synthetic epitope
TKPLISKESG

SEQ ID NO: 50806 - protein, 10 aa, Artificial Sequence
  Description of Artificial Sequence: Synthetic epitope
TKPQRRDQRT

SEQ ID NO: 50807 - protein, 10 aa, Artificial Sequence
  Description of Artificial Sequence: Synthetic epitope
TKPSIMDKVQ

SEQ ID NO: 50808 - protein, 10 aa, Artificial Sequence
  Description of Artificial Sequence: Synthetic epitope
TKPTEASADQ

SEQ ID NO: 50809 - protein, 10 aa, Artificial Sequence
  Description of Artificial Sequence: Synthetic epitope
TKPTRTSKVR

SEQ ID NO: 50810 - protein, 10 aa, Artificial Sequence
  Description of Artificial Sequence: Synthetic epitope
TKPTTVKEAQ

SEQ ID NO: 50811 - protein, 10 aa, Artificial Sequence
  Description of Artificial Sequence: Synthetic epitope
TKPVEISADG

SEQ ID NO: 50812 - protein, 10 aa, Artificial Sequence
  Description of Artificial Sequence: Synthetic epitope
TKPVEQRETA

SEQ ID NO: 50813 - protein, 10 aa, Artificial Sequence
  Description of Artificial Sequence: Synthetic epitope
TKQAALGIMQ

SEQ ID NO: 50814 - protein, 10 aa, Artificial Sequence
  Description of Artificial Sequence: Synthetic epitope
TKQAGEIKTL

SEQ ID NO: 50815 - protein, 10 aa, Artificial Sequence
  Description of Artificial Sequence: Synthetic epitope
TKQDDKKGQK

SEQ ID NO: 50816 - protein, 10 aa, Artificial Sequence
  Description of Artificial Sequence: Synthetic epitope
TKQDMSKSNG

SEQ ID NO: 50817 - protein, 10 aa, Artificial Sequence
  Description of Artificial Sequence: Synthetic epitope
TKQEAAKAQT

SEQ ID NO: 50818 - protein, 10 aa, Artificial Sequence
  Description of Artificial Sequence: Synthetic epitope
TKQEARRDEG

SEQ ID NO: 50819 - protein, 10 aa, Artificial Sequence
  Description of Artificial Sequence: Synthetic epitope
TKQELSFSDK

SEQ ID NO: 50820 - protein, 10 aa, Artificial Sequence
  Description of Artificial Sequence: Synthetic epitope
TKQETVPFGD

SEQ ID NO: 50821 - protein, 10 aa, Artificial Sequence
  Description of Artificial Sequence: Synthetic epitope
TKQIASVKAA

SEQ ID NO: 50822 - protein, 10 aa, Artificial Sequence
  Description of Artificial Sequence: Synthetic epitope
TKQKNIIERQ

SEQ ID NO: 50823 - protein, 10 aa, Artificial Sequence
  Description of Artificial Sequence: Synthetic epitope
TKQKNPTQKK

SEQ ID NO: 50824 - protein, 10 aa, Artificial Sequence
  Description of Artificial Sequence: Synthetic epitope
TKQKSTGVED

SEQ ID NO: 50825 - protein, 10 aa, Artificial Sequence
  Description of Artificial Sequence: Synthetic epitope
TKQLESLWSD

SEQ ID NO: 50826 - protein, 10 aa, Artificial Sequence
  Description of Artificial Sequence: Synthetic epitope
TKQLSRTLSR

SEQ ID NO: 50827 - protein, 10 aa, Artificial Sequence
  Description of Artificial Sequence: Synthetic epitope
TKQNNEEFQE

SEQ ID NO: 50828 - protein, 10 aa, Artificial Sequence
  Description of Artificial Sequence: Synthetic epitope
TKQSLFTKYP

SEQ ID NO: 50829 - protein, 10 aa, Artificial Sequence
  Description of Artificial Sequence: Synthetic epitope
TKQTIKYIRE

SEQ ID NO: 50830 - protein, 10 aa, Artificial Sequence
  Description of Artificial Sequence: Synthetic epitope
TKQTKEKIYQ

SEQ ID NO: 50831 - protein, 10 aa, Artificial Sequence
  Description of Artificial Sequence: Synthetic epitope
TKQTSGATTE

SEQ ID NO: 50832 - protein, 10 aa, Artificial Sequence
  Description of Artificial Sequence: Synthetic epitope
TKQVALQSQF

SEQ ID NO: 50833 - protein, 10 aa, Artificial Sequence
  Description of Artificial Sequence: Synthetic epitope
TKQVELTAQD

SEQ ID NO: 50834 - protein, 10 aa, Artificial Sequence
  Description of Artificial Sequence: Synthetic epitope
TKQYEKSEND

SEQ ID NO: 50835 - protein, 10 aa, Artificial Sequence
  Description of Artificial Sequence: Synthetic epitope
TKRDTERNKD

SEQ ID NO: 50836 - protein, 10 aa, Artificial Sequence
  Description of Artificial Sequence: Synthetic epitope
TKREAALILG

SEQ ID NO: 50837 - protein, 10 aa, Artificial Sequence
  Description of Artificial Sequence: Synthetic epitope
TKRGEKMTRE

SEQ ID NO: 50838 - protein, 10 aa, Artificial Sequence
  Description of Artificial Sequence: Synthetic epitope
TKRKKTINLN

SEQ ID NO: 50839 - protein, 10 aa, Artificial Sequence
  Description of Artificial Sequence: Synthetic epitope
TKRKLLTPAE

SEQ ID NO: 50840 - protein, 10 aa, Artificial Sequence
  Description of Artificial Sequence: Synthetic epitope
TKRKMAQAVT

SEQ ID NO: 50841 - protein, 10 aa, Artificial Sequence
  Description of Artificial Sequence: Synthetic epitope
TKRKTVTVND

SEQ ID NO: 50842 - protein, 10 aa, Artificial Sequence
  Description of Artificial Sequence: Synthetic epitope
TKRNEKSKEY

SEQ ID NO: 50843 - protein, 10 aa, Artificial Sequence
  Description of Artificial Sequence: Synthetic epitope
TKRRKRTIAD

SEQ ID NO: 50844 - protein, 10 aa, Artificial Sequence
  Description of Artificial Sequence: Synthetic epitope
TKRSGHTQTD

SEQ ID NO: 50845 - protein, 10 aa, Artificial Sequence
  Description of Artificial Sequence: Synthetic epitope
TKRSRAQEEQ

SEQ ID NO: 50846 - protein, 10 aa, Artificial Sequence
  Description of Artificial Sequence: Synthetic epitope
TKRSTTLDAG

SEQ ID NO: 50847 - protein, 10 aa, Artificial Sequence
  Description of Artificial Sequence: Synthetic epitope
TKRTLSETSS

SEQ ID NO: 50848 - protein, 10 aa, Artificial Sequence
  Description of Artificial Sequence: Synthetic epitope
TKRTSLSRGI

SEQ ID NO: 50849 - protein, 10 aa, Artificial Sequence
  Description of Artificial Sequence: Synthetic epitope
TKSAKSGSEA

SEQ ID NO: 50850 - protein, 10 aa, Artificial Sequence
  Description of Artificial Sequence: Synthetic epitope
TKSALSAVAS

SEQ ID NO: 50851 - protein, 10 aa, Artificial Sequence
  Description of Artificial Sequence: Synthetic epitope
TKSAQKAQKA

SEQ ID NO: 50852 - protein, 10 aa, Artificial Sequence
  Description of Artificial Sequence: Synthetic epitope
TKSAQKAQKA

SEQ ID NO: 50853 - protein, 10 aa, Artificial Sequence
  Description of Artificial Sequence: Synthetic epitope
TKSEMIEYHD

SEQ ID NO: 50854 - protein, 10 aa, Artificial Sequence
  Description of Artificial Sequence: Synthetic epitope
TKSENINKDN

SEQ ID NO: 50855 - protein, 10 aa, Artificial Sequence
  Description of Artificial Sequence: Synthetic epitope
TKSKSTSSER

SEQ ID NO: 50856 - protein, 10 aa, Artificial Sequence
  Description of Artificial Sequence: Synthetic epitope
TKSKTNKGGI

SEQ ID NO: 50857 - protein, 10 aa, Artificial Sequence
  Description of Artificial Sequence: Synthetic epitope
TKSLSKDSSF

SEQ ID NO: 50858 - protein, 10 aa, Artificial Sequence
  Description of Artificial Sequence: Synthetic epitope
TKSNKKIAMI

SEQ ID NO: 50859 - protein, 10 aa, Artificial Sequence
  Description of Artificial Sequence: Synthetic epitope
TKSPKVTKRT

SEQ ID NO: 50860 - protein, 10 aa, Artificial Sequence
  Description of Artificial Sequence: Synthetic epitope
TKSPQRKSIM

SEQ ID NO: 50861 - protein, 10 aa, Artificial Sequence
  Description of Artificial Sequence: Synthetic epitope
TKSQGALAGR

SEQ ID NO: 50862 - protein, 10 aa, Artificial Sequence
  Description of Artificial Sequence: Synthetic epitope
TKSQIIRIFG

SEQ ID NO: 50863 - protein, 10 aa, Artificial Sequence
  Description of Artificial Sequence: Synthetic epitope
TKSQVSKHQR

SEQ ID NO: 50864 - protein, 10 aa, Artificial Sequence
  Description of Artificial Sequence: Synthetic epitope
TKSRNEPFQR

SEQ ID NO: 50865 - protein, 10 aa, Artificial Sequence
  Description of Artificial Sequence: Synthetic epitope
TKSRSFTSSY

SEQ ID NO: 50866 - protein, 10 aa, Artificial Sequence
  Description of Artificial Sequence: Synthetic epitope
TKSSEKAAND

SEQ ID NO: 50867 - protein, 10 aa, Artificial Sequence
  Description of Artificial Sequence: Synthetic epitope
TKSSQAVRAV

SEQ ID NO: 50868 - protein, 10 aa, Artificial Sequence
  Description of Artificial Sequence: Synthetic epitope
TKSSVTSKSQ

SEQ ID NO: 50869 - protein, 10 aa, Artificial Sequence
  Description of Artificial Sequence: Synthetic epitope
TKSVLKKGDK

SEQ ID NO: 50870 - protein, 10 aa, Artificial Sequence
  Description of Artificial Sequence: Synthetic epitope
TKSVRLVQLE

SEQ ID NO: 50871 - protein, 10 aa, Artificial Sequence
  Description of Artificial Sequence: Synthetic epitope
TKSVTRQTGS

SEQ ID NO: 50872 - protein, 10 aa, Artificial Sequence
  Description of Artificial Sequence: Synthetic epitope
TKTAKKGLEL

SEQ ID NO: 50873 - protein, 10 aa, Artificial Sequence
  Description of Artificial Sequence: Synthetic epitope
TKTANLAEAN

SEQ ID NO: 50874 - protein, 10 aa, Artificial Sequence
  Description of Artificial Sequence: Synthetic epitope
TKTAVSKLAK

SEQ ID NO: 50875 - protein, 10 aa, Artificial Sequence
  Description of Artificial Sequence: Synthetic epitope
TKTETVKAQA

SEQ ID NO: 50876 - protein, 10 aa, Artificial Sequence
  Description of Artificial Sequence: Synthetic epitope
TKTGSELMEI

SEQ ID NO: 50877 - protein, 10 aa, Artificial Sequence
  Description of Artificial Sequence: Synthetic epitope
TKTIRQAMFQ

SEQ ID NO: 50878 - protein, 10 aa, Artificial Sequence
  Description of Artificial Sequence: Synthetic epitope
TKTKAEEAEM

SEQ ID NO: 50879 - protein, 10 aa, Artificial Sequence
  Description of Artificial Sequence: Synthetic epitope
TKTKKAAESL

SEQ ID NO: 50880 - protein, 10 aa, Artificial Sequence
  Description of Artificial Sequence: Synthetic epitope
TKTLPISKLS

SEQ ID NO: 50881 - protein, 10 aa, Artificial Sequence
  Description of Artificial Sequence: Synthetic epitope
TKTNLTSQSS

SEQ ID NO: 50882 - protein, 10 aa, Artificial Sequence
  Description of Artificial Sequence: Synthetic epitope
TKTQNNLESD

SEQ ID NO: 50883 - protein, 10 aa, Artificial Sequence
  Description of Artificial Sequence: Synthetic epitope
TKTRLVESRQ

SEQ ID NO: 50884 - protein, 10 aa, Artificial Sequence
  Description of Artificial Sequence: Synthetic epitope
TKTRSMMALL

SEQ ID NO: 50885 - protein, 10 aa, Artificial Sequence
  Description of Artificial Sequence: Synthetic epitope
TKTVTESRPL

SEQ ID NO: 50886 - protein, 10 aa, Artificial Sequence
  Description of Artificial Sequence: Synthetic epitope
TKVAEMAQQH

SEQ ID NO: 50887 - protein, 10 aa, Artificial Sequence
  Description of Artificial Sequence: Synthetic epitope
TKVDEYGAKD

SEQ ID NO: 50888 - protein, 10 aa, Artificial Sequence
  Description of Artificial Sequence: Synthetic epitope
TKVDSRPKED

SEQ ID NO: 50889 - protein, 10 aa, Artificial Sequence
  Description of Artificial Sequence: Synthetic epitope
TKVFSSESNF

SEQ ID NO: 50890 - protein, 10 aa, Artificial Sequence
  Description of Artificial Sequence: Synthetic epitope
TKVGQKKTPA

SEQ ID NO: 50891 - protein, 10 aa, Artificial Sequence
  Description of Artificial Sequence: Synthetic epitope
TKVIQLKMDF

SEQ ID NO: 50892 - protein, 10 aa, Artificial Sequence
  Description of Artificial Sequence: Synthetic epitope
TKVKANSVKQ

SEQ ID NO: 50893 - protein, 10 aa, Artificial Sequence
  Description of Artificial Sequence: Synthetic epitope
TKVKEALLIK

SEQ ID NO: 50894 - protein, 10 aa, Artificial Sequence
  Description of Artificial Sequence: Synthetic epitope
TKVKVLNMAE

SEQ ID NO: 50895 - protein, 10 aa, Artificial Sequence
  Description of Artificial Sequence: Synthetic epitope
TKVLSAHRKS

SEQ ID NO: 50896 - protein, 10 aa, Artificial Sequence
  Description of Artificial Sequence: Synthetic epitope
TKVNAVYLLP

SEQ ID NO: 50897 - protein, 10 aa, Artificial Sequence
  Description of Artificial Sequence: Synthetic epitope
TKVPAIQQKR

SEQ ID NO: 50898 - protein, 10 aa, Artificial Sequence
  Description of Artificial Sequence: Synthetic epitope
TKVRMSVQRR

SEQ ID NO: 50899 - protein, 10 aa, Artificial Sequence
  Description of Artificial Sequence: Synthetic epitope
TKVRRHDMRV

SEQ ID NO: 50900 - protein, 10 aa, Artificial Sequence
  Description of Artificial Sequence: Synthetic epitope
TKVTTSITSK

SEQ ID NO: 50901 - protein, 10 aa, Artificial Sequence
  Description of Artificial Sequence: Synthetic epitope
TKVVTVVTTK

SEQ ID NO: 50902 - protein, 10 aa, Artificial Sequence
  Description of Artificial Sequence: Synthetic epitope
TKWLESSQHT

SEQ ID NO: 50903 - protein, 10 aa, Artificial Sequence
  Description of Artificial Sequence: Synthetic epitope
TKWQRIMGIN

SEQ ID NO: 50904 - protein, 10 aa, Artificial Sequence
  Description of Artificial Sequence: Synthetic epitope
TKYESSLYSQ

SEQ ID NO: 50905 - protein, 10 aa, Artificial Sequence
  Description of Artificial Sequence: Synthetic epitope
TLAATSTAAQ

SEQ ID NO: 50906 - protein, 10 aa, Artificial Sequence
  Description of Artificial Sequence: Synthetic epitope
TLAAVLLQSL

SEQ ID NO: 50907 - protein, 10 aa, Artificial Sequence
  Description of Artificial Sequence: Synthetic epitope
TLAELETTKT

SEQ ID NO: 50908 - protein, 10 aa, Artificial Sequence
  Description of Artificial Sequence: Synthetic epitope
TLAGAQQELL

SEQ ID NO: 50909 - protein, 10 aa, Artificial Sequence
  Description of Artificial Sequence: Synthetic epitope
TLAIRIQSIH

SEQ ID NO: 50910 - protein, 10 aa, Artificial Sequence
  Description of Artificial Sequence: Synthetic epitope
TLAKIRKAAR

SEQ ID NO: 50911 - protein, 10 aa, Artificial Sequence
  Description of Artificial Sequence: Synthetic epitope
TLAQKDLQES

SEQ ID NO: 50912 - protein, 10 aa, Artificial Sequence
  Description of Artificial Sequence: Synthetic epitope
TLAQLKEAED

SEQ ID NO: 50913 - protein, 10 aa, Artificial Sequence
  Description of Artificial Sequence: Synthetic epitope
TLAQQSNSPF

SEQ ID NO: 50914 - protein, 10 aa, Artificial Sequence
  Description of Artificial Sequence: Synthetic epitope
TLASAISEGT

SEQ ID NO: 50915 - protein, 10 aa, Artificial Sequence
  Description of Artificial Sequence: Synthetic epitope
TLASDASSQT

SEQ ID NO: 50916 - protein, 10 aa, Artificial Sequence
  Description of Artificial Sequence: Synthetic epitope
TLASRLERQG

SEQ ID NO: 50917 - protein, 10 aa, Artificial Sequence
  Description of Artificial Sequence: Synthetic epitope
TLASSNKKSK

SEQ ID NO: 50918 - protein, 10 aa, Artificial Sequence
  Description of Artificial Sequence: Synthetic epitope
TLASSTEKRR

SEQ ID NO: 50919 - protein, 10 aa, Artificial Sequence
  Description of Artificial Sequence: Synthetic epitope
TLASTNLTSS

SEQ ID NO: 50920 - protein, 10 aa, Artificial Sequence
  Description of Artificial Sequence: Synthetic epitope
TLAVQAVSIP

SEQ ID NO: 50921 - protein, 10 aa, Artificial Sequence
  Description of Artificial Sequence: Synthetic epitope
TLDEEMVKTR

SEQ ID NO: 50922 - protein, 10 aa, Artificial Sequence
  Description of Artificial Sequence: Synthetic epitope
TLDKATVLGE

SEQ ID NO: 50923 - protein, 10 aa, Artificial Sequence
  Description of Artificial Sequence: Synthetic epitope
TLDLEKKAVA

SEQ ID NO: 50924 - protein, 10 aa, Artificial Sequence
  Description of Artificial Sequence: Synthetic epitope
TLDLVAVSSV

SEQ ID NO: 50925 - protein, 10 aa, Artificial Sequence
  Description of Artificial Sequence: Synthetic epitope
TLDQQVVIHL

SEQ ID NO: 50926 - protein, 10 aa, Artificial Sequence
  Description of Artificial Sequence: Synthetic epitope
TLDQSTVHIL

SEQ ID NO: 50927 - protein, 10 aa, Artificial Sequence
  Description of Artificial Sequence: Synthetic epitope
TLDSFMQHDV

SEQ ID NO: 50928 - protein, 10 aa, Artificial Sequence
  Description of Artificial Sequence: Synthetic epitope
TLDSKTYINS

SEQ ID NO: 50929 - protein, 10 aa, Artificial Sequence
  Description of Artificial Sequence: Synthetic epitope
TLDSLSQVSQ

SEQ ID NO: 50930 - protein, 10 aa, Artificial Sequence
  Description of Artificial Sequence: Synthetic epitope
TLDTEDHKAK

SEQ ID NO: 50931 - protein, 10 aa, Artificial Sequence
  Description of Artificial Sequence: Synthetic epitope
TLDTRALLKL

SEQ ID NO: 50932 - protein, 10 aa, Artificial Sequence
  Description of Artificial Sequence: Synthetic epitope
TLDTTLSATE

SEQ ID NO: 50933 - protein, 10 aa, Artificial Sequence
  Description of Artificial Sequence: Synthetic epitope
TLEAKALAEE

SEQ ID NO: 50934 - protein, 10 aa, Artificial Sequence
  Description of Artificial Sequence: Synthetic epitope
TLEDSSNMSL

SEQ ID NO: 50935 - protein, 10 aa, Artificial Sequence
  Description of Artificial Sequence: Synthetic epitope
TLEFKIREEV

SEQ ID NO: 50936 - protein, 10 aa, Artificial Sequence
  Description of Artificial Sequence: Synthetic epitope
TLEFLKIPST

SEQ ID NO: 50937 - protein, 10 aa, Artificial Sequence
  Description of Artificial Sequence: Synthetic epitope
TLEIEILGAL

SEQ ID NO: 50938 - protein, 10 aa, Artificial Sequence
  Description of Artificial Sequence: Synthetic epitope
TLEKFASSQK

SEQ ID NO: 50939 - protein, 10 aa, Artificial Sequence
  Description of Artificial Sequence: Synthetic epitope
TLEKLEAIAT

SEQ ID NO: 50940 - protein, 10 aa, Artificial Sequence
  Description of Artificial Sequence: Synthetic epitope
TLELQTLQPT

SEQ ID NO: 50941 - protein, 10 aa, Artificial Sequence
  Description of Artificial Sequence: Synthetic epitope
TLEPLETEGA

SEQ ID NO: 50942 - protein, 10 aa, Artificial Sequence
  Description of Artificial Sequence: Synthetic epitope
TLEQVAGIQR

SEQ ID NO: 50943 - protein, 10 aa, Artificial Sequence
  Description of Artificial Sequence: Synthetic epitope
TLERTKMTKG

SEQ ID NO: 50944 - protein, 10 aa, Artificial Sequence
  Description of Artificial Sequence: Synthetic epitope
TLETMKMMLD

SEQ ID NO: 50945 - protein, 10 aa, Artificial Sequence
  Description of Artificial Sequence: Synthetic epitope
TLGASSLREE

SEQ ID NO: 50946 - protein, 10 aa, Artificial Sequence
  Description of Artificial Sequence: Synthetic epitope
TLGKASKQAG

SEQ ID NO: 50947 - protein, 10 aa, Artificial Sequence
  Description of Artificial Sequence: Synthetic epitope
TLGLSTQGQA

SEQ ID NO: 50948 - protein, 10 aa, Artificial Sequence
  Description of Artificial Sequence: Synthetic epitope
TLGSALSLPV

SEQ ID NO: 50949 - protein, 10 aa, Artificial Sequence
  Description of Artificial Sequence: Synthetic epitope
TLGTLQSSQQ

SEQ ID NO: 50950 - protein, 10 aa, Artificial Sequence
  Description of Artificial Sequence: Synthetic epitope
TLHAISSKNQ

SEQ ID NO: 50951 - protein, 10 aa, Artificial Sequence
  Description of Artificial Sequence: Synthetic epitope
TLHHKAKGIL

SEQ ID NO: 50952 - protein, 10 aa, Artificial Sequence
  Description of Artificial Sequence: Synthetic epitope
TLHKDPMRHD

SEQ ID NO: 50953 - protein, 10 aa, Artificial Sequence
  Description of Artificial Sequence: Synthetic epitope
TLHKFASKPA

SEQ ID NO: 50954 - protein, 10 aa, Artificial Sequence
  Description of Artificial Sequence: Synthetic epitope
TLHQNVEADI

SEQ ID NO: 50955 - protein, 10 aa, Artificial Sequence
  Description of Artificial Sequence: Synthetic epitope
TLHSLIQQGQ

SEQ ID NO: 50956 - protein, 10 aa, Artificial Sequence
  Description of Artificial Sequence: Synthetic epitope
TLIAHKVDEQ

SEQ ID NO: 50957 - protein, 10 aa, Artificial Sequence
  Description of Artificial Sequence: Synthetic epitope
TLIAKSSMQN

SEQ ID NO: 50958 - protein, 10 aa, Artificial Sequence
  Description of Artificial Sequence: Synthetic epitope
TLIAQSSKSL

SEQ ID NO: 50959 - protein, 10 aa, Artificial Sequence
  Description of Artificial Sequence: Synthetic epitope
TLIDYEDSQS

SEQ ID NO: 50960 - protein, 10 aa, Artificial Sequence
  Description of Artificial Sequence: Synthetic epitope
TLIESVKVQD

SEQ ID NO: 50961 - protein, 10 aa, Artificial Sequence
  Description of Artificial Sequence: Synthetic epitope
TLIKLASSGK

SEQ ID NO: 50962 - protein, 10 aa, Artificial Sequence
  Description of Artificial Sequence: Synthetic epitope
TLIVTKAISS

SEQ ID NO: 50963 - protein, 10 aa, Artificial Sequence
  Description of Artificial Sequence: Synthetic epitope
TLKAEEAEEL

SEQ ID NO: 50964 - protein, 10 aa, Artificial Sequence
  Description of Artificial Sequence: Synthetic epitope
TLKAKKGIKE

SEQ ID NO: 50965 - protein, 10 aa, Artificial Sequence
  Description of Artificial Sequence: Synthetic epitope
TLKASEKSTM

SEQ ID NO: 50966 - protein, 10 aa, Artificial Sequence
  Description of Artificial Sequence: Synthetic epitope
TLKAVTTRAT

SEQ ID NO: 50967 - protein, 10 aa, Artificial Sequence
  Description of Artificial Sequence: Synthetic epitope
TLKDTKGAQK

SEQ ID NO: 50968 - protein, 10 aa, Artificial Sequence
  Description of Artificial Sequence: Synthetic epitope
TLKEDQAANT

SEQ ID NO: 50969 - protein, 10 aa, Artificial Sequence
  Description of Artificial Sequence: Synthetic epitope
TLKEESQSRH

SEQ ID NO: 50970 - protein, 10 aa, Artificial Sequence
  Description of Artificial Sequence: Synthetic epitope
TLKEKSLGAE

SEQ ID NO: 50971 - protein, 10 aa, Artificial Sequence
  Description of Artificial Sequence: Synthetic epitope
TLKESTLIQK

SEQ ID NO: 50972 - protein, 10 aa, Artificial Sequence
  Description of Artificial Sequence: Synthetic epitope
TLKKQISEDR

SEQ ID NO: 50973 - protein, 10 aa, Artificial Sequence
  Description of Artificial Sequence: Synthetic epitope
TLKLAKLEME

SEQ ID NO: 50974 - protein, 10 aa, Artificial Sequence
  Description of Artificial Sequence: Synthetic epitope
TLKLNTAAST

SEQ ID NO: 50975 - protein, 10 aa, Artificial Sequence
  Description of Artificial Sequence: Synthetic epitope
TLKRKKLLNQ

SEQ ID NO: 50976 - protein, 10 aa, Artificial Sequence
  Description of Artificial Sequence: Synthetic epitope
TLKSALALAI

SEQ ID NO: 50977 - protein, 10 aa, Artificial Sequence
  Description of Artificial Sequence: Synthetic epitope
TLKTAKTKQK

SEQ ID NO: 50978 - protein, 10 aa, Artificial Sequence
  Description of Artificial Sequence: Synthetic epitope
TLKTLMNAVS

SEQ ID NO: 50979 - protein, 10 aa, Artificial Sequence
  Description of Artificial Sequence: Synthetic epitope
TLKTQDDIET

SEQ ID NO: 50980 - protein, 10 aa, Artificial Sequence
  Description of Artificial Sequence: Synthetic epitope
TLKTTNETRQ

SEQ ID NO: 50981 - protein, 10 aa, Artificial Sequence
  Description of Artificial Sequence: Synthetic epitope
TLKVDRGSEE

SEQ ID NO: 50982 - protein, 10 aa, Artificial Sequence
  Description of Artificial Sequence: Synthetic epitope
TLLAESLFQL

SEQ ID NO: 50983 - protein, 10 aa, Artificial Sequence
  Description of Artificial Sequence: Synthetic epitope
TLLAESSNPA

SEQ ID NO: 50984 - protein, 10 aa, Artificial Sequence
  Description of Artificial Sequence: Synthetic epitope
TLLAKNAQQK

SEQ ID NO: 50985 - protein, 10 aa, Artificial Sequence
  Description of Artificial Sequence: Synthetic epitope
TLLASSDMQV

SEQ ID NO: 50986 - protein, 10 aa, Artificial Sequence
  Description of Artificial Sequence: Synthetic epitope
TLLAVNKATE

SEQ ID NO: 50987 - protein, 10 aa, Artificial Sequence
  Description of Artificial Sequence: Synthetic epitope
TLLETEVIKS

SEQ ID NO: 50988 - protein, 10 aa, Artificial Sequence
  Description of Artificial Sequence: Synthetic epitope
TLLGTIMPEE

SEQ ID NO: 50989 - protein, 10 aa, Artificial Sequence
  Description of Artificial Sequence: Synthetic epitope
TLLQRYQRSE

SEQ ID NO: 50990 - protein, 10 aa, Artificial Sequence
  Description of Artificial Sequence: Synthetic epitope
TLLSQISTKD

SEQ ID NO: 50991 - protein, 10 aa, Artificial Sequence
  Description of Artificial Sequence: Synthetic epitope
TLLSQSVALP

SEQ ID NO: 50992 - protein, 10 aa, Artificial Sequence
  Description of Artificial Sequence: Synthetic epitope
TLLTKEVMEY

SEQ ID NO: 50993 - protein, 10 aa, Artificial Sequence
  Description of Artificial Sequence: Synthetic epitope
TLLTKSTRLT

SEQ ID NO: 50994 - protein, 10 aa, Artificial Sequence
  Description of Artificial Sequence: Synthetic epitope
TLMHNENLNG

SEQ ID NO: 50995 - protein, 10 aa, Artificial Sequence
  Description of Artificial Sequence: Synthetic epitope
TLMKLRHSSA

SEQ ID NO: 50996 - protein, 10 aa, Artificial Sequence
  Description of Artificial Sequence: Synthetic epitope
TLMPVSVKLP

SEQ ID NO: 50997 - protein, 10 aa, Artificial Sequence
  Description of Artificial Sequence: Synthetic epitope
TLMSNQLKDL

SEQ ID NO: 50998 - protein, 10 aa, Artificial Sequence
  Description of Artificial Sequence: Synthetic epitope
TLMSSESSNQ

SEQ ID NO: 50999 - protein, 10 aa, Artificial Sequence
  Description of Artificial Sequence: Synthetic epitope
TLMTMAIRII

SEQ ID NO: 51000 - protein, 10 aa, Artificial Sequence
  Description of Artificial Sequence: Synthetic epitope
TLMYRHKSKQ

SEQ ID NO: 51001 - protein, 10 aa, Artificial Sequence
  Description of Artificial Sequence: Synthetic epitope
TLNAIAKNIL

SEQ ID NO: 51002 - protein, 10 aa, Artificial Sequence
  Description of Artificial Sequence: Synthetic epitope
TLNDKLFAKF

SEQ ID NO: 51003 - protein, 10 aa, Artificial Sequence
  Description of Artificial Sequence: Synthetic epitope
TLNEVYTILS

SEQ ID NO: 51004 - protein, 10 aa, Artificial Sequence
  Description of Artificial Sequence: Synthetic epitope
TLNIQNKIPA

SEQ ID NO: 51005 - protein, 10 aa, Artificial Sequence
  Description of Artificial Sequence: Synthetic epitope
TLNSAAPASN

SEQ ID NO: 51006 - protein, 10 aa, Artificial Sequence
  Description of Artificial Sequence: Synthetic epitope
TLPERLKASE

SEQ ID NO: 51007 - protein, 10 aa, Artificial Sequence
  Description of Artificial Sequence: Synthetic epitope
TLPESKLKVN

SEQ ID NO: 51008 - protein, 10 aa, Artificial Sequence
  Description of Artificial Sequence: Synthetic epitope
TLPGQSLIDK

SEQ ID NO: 51009 - protein, 10 aa, Artificial Sequence
  Description of Artificial Sequence: Synthetic epitope
TLPKEAAGAG

SEQ ID NO: 51010 - protein, 10 aa, Artificial Sequence
  Description of Artificial Sequence: Synthetic epitope
TLPLARSSAR

SEQ ID NO: 51011 - protein, 10 aa, Artificial Sequence
  Description of Artificial Sequence: Synthetic epitope
TLPLRRSTIQ

SEQ ID NO: 51012 - protein, 10 aa, Artificial Sequence
  Description of Artificial Sequence: Synthetic epitope
TLPLSSRAGA

SEQ ID NO: 51013 - protein, 10 aa, Artificial Sequence
  Description of Artificial Sequence: Synthetic epitope
TLPLTVLKSR

SEQ ID NO: 51014 - protein, 10 aa, Artificial Sequence
  Description of Artificial Sequence: Synthetic epitope
TLPQTRQRAK

SEQ ID NO: 51015 - protein, 10 aa, Artificial Sequence
  Description of Artificial Sequence: Synthetic epitope
TLQAQLTQAQ

SEQ ID NO: 51016 - protein, 10 aa, Artificial Sequence
  Description of Artificial Sequence: Synthetic epitope
TLQATVDSSQ

SEQ ID NO: 51017 - protein, 10 aa, Artificial Sequence
  Description of Artificial Sequence: Synthetic epitope
TLQHEEIKFI

SEQ ID NO: 51018 - protein, 10 aa, Artificial Sequence
  Description of Artificial Sequence: Synthetic epitope
TLQLDSSLLI

SEQ ID NO: 51019 - protein, 10 aa, Artificial Sequence
  Description of Artificial Sequence: Synthetic epitope
TLQLSHKSDS

SEQ ID NO: 51020 - protein, 10 aa, Artificial Sequence
  Description of Artificial Sequence: Synthetic epitope
TLQNQVARLE

SEQ ID NO: 51021 - protein, 10 aa, Artificial Sequence
  Description of Artificial Sequence: Synthetic epitope
TLQPNQNMTS

SEQ ID NO: 51022 - protein, 10 aa, Artificial Sequence
  Description of Artificial Sequence: Synthetic epitope
TLQPRIKAPQ

SEQ ID NO: 51023 - protein, 10 aa, Artificial Sequence
  Description of Artificial Sequence: Synthetic epitope
TLQQAILKIS

SEQ ID NO: 51024 - protein, 10 aa, Artificial Sequence
  Description of Artificial Sequence: Synthetic epitope
TLQQNAESRF

SEQ ID NO: 51025 - protein, 10 aa, Artificial Sequence
  Description of Artificial Sequence: Synthetic epitope
TLQSINQTDQ

SEQ ID NO: 51026 - protein, 10 aa, Artificial Sequence
  Description of Artificial Sequence: Synthetic epitope
TLQSNTKKMP

SEQ ID NO: 51027 - protein, 10 aa, Artificial Sequence
  Description of Artificial Sequence: Synthetic epitope
TLQSQASRST

SEQ ID NO: 51028 - protein, 10 aa, Artificial Sequence
  Description of Artificial Sequence: Synthetic epitope
TLQSQLAVHM

SEQ ID NO: 51029 - protein, 10 aa, Artificial Sequence
  Description of Artificial Sequence: Synthetic epitope
TLQSQLQLLQ

SEQ ID NO: 51030 - protein, 10 aa, Artificial Sequence
  Description of Artificial Sequence: Synthetic epitope
TLQVEAVEST

SEQ ID NO: 51031 - protein, 10 aa, Artificial Sequence
  Description of Artificial Sequence: Synthetic epitope
TLRDTIDQGL

SEQ ID NO: 51032 - protein, 10 aa, Artificial Sequence
  Description of Artificial Sequence: Synthetic epitope
TLRHSEATEV

SEQ ID NO: 51033 - protein, 10 aa, Artificial Sequence
  Description of Artificial Sequence: Synthetic epitope
TLRKKTKSKR

SEQ ID NO: 51034 - protein, 10 aa, Artificial Sequence
  Description of Artificial Sequence: Synthetic epitope
TLRLSRVRSS

SEQ ID NO: 51035 - protein, 10 aa, Artificial Sequence
  Description of Artificial Sequence: Synthetic epitope
TLRLSVIGRL

SEQ ID NO: 51036 - protein, 10 aa, Artificial Sequence
  Description of Artificial Sequence: Synthetic epitope
TLRNLSMKAR

SEQ ID NO: 51037 - protein, 10 aa, Artificial Sequence
  Description of Artificial Sequence: Synthetic epitope
TLRSGSEPVR

SEQ ID NO: 51038 - protein, 10 aa, Artificial Sequence
  Description of Artificial Sequence: Synthetic epitope
TLSAKIQFNT

SEQ ID NO: 51039 - protein, 10 aa, Artificial Sequence
  Description of Artificial Sequence: Synthetic epitope
TLSASALSDS

SEQ ID NO: 51040 - protein, 10 aa, Artificial Sequence
  Description of Artificial Sequence: Synthetic epitope
TLSATPNHVE

SEQ ID NO: 51041 - protein, 10 aa, Artificial Sequence
  Description of Artificial Sequence: Synthetic epitope
TLSEASTAGR

SEQ ID NO: 51042 - protein, 10 aa, Artificial Sequence
  Description of Artificial Sequence: Synthetic epitope
TLSEISSNKQ

SEQ ID NO: 51043 - protein, 10 aa, Artificial Sequence
  Description of Artificial Sequence: Synthetic epitope
TLSESTMNTL

SEQ ID NO: 51044 - protein, 10 aa, Artificial Sequence
  Description of Artificial Sequence: Synthetic epitope
TLSEVVRVGT

SEQ ID NO: 51045 - protein, 10 aa, Artificial Sequence
  Description of Artificial Sequence: Synthetic epitope
TLSFKDSTNK

SEQ ID NO: 51046 - protein, 10 aa, Artificial Sequence
  Description of Artificial Sequence: Synthetic epitope
TLSGGSSTTR

SEQ ID NO: 51047 - protein, 10 aa, Artificial Sequence
  Description of Artificial Sequence: Synthetic epitope
TLSGLTSRNK

SEQ ID NO: 51048 - protein, 10 aa, Artificial Sequence
  Description of Artificial Sequence: Synthetic epitope
TLSISELEEP

SEQ ID NO: 51049 - protein, 10 aa, Artificial Sequence
  Description of Artificial Sequence: Synthetic epitope
TLSKLKRSVV

SEQ ID NO: 51050 - protein, 10 aa, Artificial Sequence
  Description of Artificial Sequence: Synthetic epitope
TLSKSKSETK

SEQ ID NO: 51051 - protein, 10 aa, Artificial Sequence
  Description of Artificial Sequence: Synthetic epitope
TLSKVNNEDP

SEQ ID NO: 51052 - protein, 10 aa, Artificial Sequence
  Description of Artificial Sequence: Synthetic epitope
TLSLLQKAKK

SEQ ID NO: 51053 - protein, 10 aa, Artificial Sequence
  Description of Artificial Sequence: Synthetic epitope
TLSLSSEESE

SEQ ID NO: 51054 - protein, 10 aa, Artificial Sequence
  Description of Artificial Sequence: Synthetic epitope
TLSNYQTNKA

SEQ ID NO: 51055 - protein, 10 aa, Artificial Sequence
  Description of Artificial Sequence: Synthetic epitope
TLSQRSIYQN

SEQ ID NO: 51056 - protein, 10 aa, Artificial Sequence
  Description of Artificial Sequence: Synthetic epitope
TLSQSKSNED

SEQ ID NO: 51057 - protein, 10 aa, Artificial Sequence
  Description of Artificial Sequence: Synthetic epitope
TLSQSYITTS

SEQ ID NO: 51058 - protein, 10 aa, Artificial Sequence
  Description of Artificial Sequence: Synthetic epitope
TLSRTLENPV

SEQ ID NO: 51059 - protein, 10 aa, Artificial Sequence
  Description of Artificial Sequence: Synthetic epitope
TLSSASGSLA

SEQ ID NO: 51060 - protein, 10 aa, Artificial Sequence
  Description of Artificial Sequence: Synthetic epitope
TLSSAVSASG

SEQ ID NO: 51061 - protein, 10 aa, Artificial Sequence
  Description of Artificial Sequence: Synthetic epitope
TLSSDTSIQA

SEQ ID NO: 51062 - protein, 10 aa, Artificial Sequence
  Description of Artificial Sequence: Synthetic epitope
TLSSKLKVKE

SEQ ID NO: 51063 - protein, 10 aa, Artificial Sequence
  Description of Artificial Sequence: Synthetic epitope
TLSSLDVKRI

SEQ ID NO: 51064 - protein, 10 aa, Artificial Sequence
  Description of Artificial Sequence: Synthetic epitope
TLSSPTEPVK

SEQ ID NO: 51065 - protein, 10 aa, Artificial Sequence
  Description of Artificial Sequence: Synthetic epitope
TLSTASMNGD

SEQ ID NO: 51066 - protein, 10 aa, Artificial Sequence
  Description of Artificial Sequence: Synthetic epitope
TLSTIATSTD

SEQ ID NO: 51067 - protein, 10 aa, Artificial Sequence
  Description of Artificial Sequence: Synthetic epitope
TLSTQEDVMV

SEQ ID NO: 51068 - protein, 10 aa, Artificial Sequence
  Description of Artificial Sequence: Synthetic epitope
TLSTRETFSK

SEQ ID NO: 51069 - protein, 10 aa, Artificial Sequence
  Description of Artificial Sequence: Synthetic epitope
TLSTSSIQNE

SEQ ID NO: 51070 - protein, 10 aa, Artificial Sequence
  Description of Artificial Sequence: Synthetic epitope
TLSTSSLKKF

SEQ ID NO: 51071 - protein, 10 aa, Artificial Sequence
  Description of Artificial Sequence: Synthetic epitope
TLSVLEAAVS

SEQ ID NO: 51072 - protein, 10 aa, Artificial Sequence
  Description of Artificial Sequence: Synthetic epitope
TLTEQTLKGR

SEQ ID NO: 51073 - protein, 10 aa, Artificial Sequence
  Description of Artificial Sequence: Synthetic epitope
TLTESQAENH

SEQ ID NO: 51074 - protein, 10 aa, Artificial Sequence
  Description of Artificial Sequence: Synthetic epitope
TLTFNRTRQA

SEQ ID NO: 51075 - protein, 10 aa, Artificial Sequence
  Description of Artificial Sequence: Synthetic epitope
TLTISNLSGR

SEQ ID NO: 51076 - protein, 10 aa, Artificial Sequence
  Description of Artificial Sequence: Synthetic epitope
TLTLIEKGSQ

SEQ ID NO: 51077 - protein, 10 aa, Artificial Sequence
  Description of Artificial Sequence: Synthetic epitope
TLTLRKSKTA

SEQ ID NO: 51078 - protein, 10 aa, Artificial Sequence
  Description of Artificial Sequence: Synthetic epitope
TLTNSNYNAE

SEQ ID NO: 51079 - protein, 10 aa, Artificial Sequence
  Description of Artificial Sequence: Synthetic epitope
TLTPEKGQSQ

SEQ ID NO: 51080 - protein, 10 aa, Artificial Sequence
  Description of Artificial Sequence: Synthetic epitope
TLTPLLSVVR

SEQ ID NO: 51081 - protein, 10 aa, Artificial Sequence
  Description of Artificial Sequence: Synthetic epitope
TLTPRTGSSD

SEQ ID NO: 51082 - protein, 10 aa, Artificial Sequence
  Description of Artificial Sequence: Synthetic epitope
TLTPSTALSK

SEQ ID NO: 51083 - protein, 10 aa, Artificial Sequence
  Description of Artificial Sequence: Synthetic epitope
TLTSNVADSP

SEQ ID NO: 51084 - protein, 10 aa, Artificial Sequence
  Description of Artificial Sequence: Synthetic epitope
TLTSRRTTRI

SEQ ID NO: 51085 - protein, 10 aa, Artificial Sequence
  Description of Artificial Sequence: Synthetic epitope
TLTVDIANKE

SEQ ID NO: 51086 - protein, 10 aa, Artificial Sequence
  Description of Artificial Sequence: Synthetic epitope
TLVAKVQSRS

SEQ ID NO: 51087 - protein, 10 aa, Artificial Sequence
  Description of Artificial Sequence: Synthetic epitope
TLVENQSEKE

SEQ ID NO: 51088 - protein, 10 aa, Artificial Sequence
  Description of Artificial Sequence: Synthetic epitope
TLVFKKTSKL

SEQ ID NO: 51089 - protein, 10 aa, Artificial Sequence
  Description of Artificial Sequence: Synthetic epitope
TLVKTFAALN

SEQ ID NO: 51090 - protein, 10 aa, Artificial Sequence
  Description of Artificial Sequence: Synthetic epitope
TLVNLAHMMS

SEQ ID NO: 51091 - protein, 10 aa, Artificial Sequence
  Description of Artificial Sequence: Synthetic epitope
TLVNSIVLEF

SEQ ID NO: 51092 - protein, 10 aa, Artificial Sequence
  Description of Artificial Sequence: Synthetic epitope
TLVSTASGTQ

SEQ ID NO: 51093 - protein, 10 aa, Artificial Sequence
  Description of Artificial Sequence: Synthetic epitope
TLVTENNDVK

SEQ ID NO: 51094 - protein, 10 aa, Artificial Sequence
  Description of Artificial Sequence: Synthetic epitope
TLVTMGYSTE

SEQ ID NO: 51095 - protein, 10 aa, Artificial Sequence
  Description of Artificial Sequence: Synthetic epitope
TLWINSEEFE

SEQ ID NO: 51096 - protein, 10 aa, Artificial Sequence
  Description of Artificial Sequence: Synthetic epitope
TLWPEVQKLY

SEQ ID NO: 51097 - protein, 10 aa, Artificial Sequence
  Description of Artificial Sequence: Synthetic epitope
TLYGQEIDQA

SEQ ID NO: 51098 - protein, 10 aa, Artificial Sequence
  Description of Artificial Sequence: Synthetic epitope
TLYISAIKAL

SEQ ID NO: 51099 - protein, 10 aa, Artificial Sequence
  Description of Artificial Sequence: Synthetic epitope
TMAATIQAME

SEQ ID NO: 51100 - protein, 10 aa, Artificial Sequence
  Description of Artificial Sequence: Synthetic epitope
TMATDSLETS

SEQ ID NO: 51101 - protein, 10 aa, Artificial Sequence
  Description of Artificial Sequence: Synthetic epitope
TMATFTMTLA

SEQ ID NO: 51102 - protein, 10 aa, Artificial Sequence
  Description of Artificial Sequence: Synthetic epitope
TMAVTAMIQS

SEQ ID NO: 51103 - protein, 10 aa, Artificial Sequence
  Description of Artificial Sequence: Synthetic epitope
TMDDKTVFHE

SEQ ID NO: 51104 - protein, 10 aa, Artificial Sequence
  Description of Artificial Sequence: Synthetic epitope
TMDESTSSVM

SEQ ID NO: 51105 - protein, 10 aa, Artificial Sequence
  Description of Artificial Sequence: Synthetic epitope
TMEAHQVIKA

SEQ ID NO: 51106 - protein, 10 aa, Artificial Sequence
  Description of Artificial Sequence: Synthetic epitope
TMEATSREAA

SEQ ID NO: 51107 - protein, 10 aa, Artificial Sequence
  Description of Artificial Sequence: Synthetic epitope
TMEILYSLEV

SEQ ID NO: 51108 - protein, 10 aa, Artificial Sequence
  Description of Artificial Sequence: Synthetic epitope
TMESLKADEG

SEQ ID NO: 51109 - protein, 10 aa, Artificial Sequence
  Description of Artificial Sequence: Synthetic epitope
TMFSSEVQFG

SEQ ID NO: 51110 - protein, 10 aa, Artificial Sequence
  Description of Artificial Sequence: Synthetic epitope
TMFSSVRSRN

SEQ ID NO: 51111 - protein, 10 aa, Artificial Sequence
  Description of Artificial Sequence: Synthetic epitope
TMGFSKSFKK

SEQ ID NO: 51112 - protein, 10 aa, Artificial Sequence
  Description of Artificial Sequence: Synthetic epitope
TMGQEKLTGP

SEQ ID NO: 51113 - protein, 10 aa, Artificial Sequence
  Description of Artificial Sequence: Synthetic epitope
TMGSFKRITL

SEQ ID NO: 51114 - protein, 10 aa, Artificial Sequence
  Description of Artificial Sequence: Synthetic epitope
TMGSTIRQPK

SEQ ID NO: 51115 - protein, 10 aa, Artificial Sequence
  Description of Artificial Sequence: Synthetic epitope
TMGSVRPSVE

SEQ ID NO: 51116 - protein, 10 aa, Artificial Sequence
  Description of Artificial Sequence: Synthetic epitope
TMIGLLAEAG

SEQ ID NO: 51117 - protein, 10 aa, Artificial Sequence
  Description of Artificial Sequence: Synthetic epitope
TMKAPLLTEV

SEQ ID NO: 51118 - protein, 10 aa, Artificial Sequence
  Description of Artificial Sequence: Synthetic epitope
TMKKFLISNS

SEQ ID NO: 51119 - protein, 10 aa, Artificial Sequence
  Description of Artificial Sequence: Synthetic epitope
TMKLSRALSD

SEQ ID NO: 51120 - protein, 10 aa, Artificial Sequence
  Description of Artificial Sequence: Synthetic epitope
TMKPILKLDI

SEQ ID NO: 51121 - protein, 10 aa, Artificial Sequence
  Description of Artificial Sequence: Synthetic epitope
TMKRLLAHRS

SEQ ID NO: 51122 - protein, 10 aa, Artificial Sequence
  Description of Artificial Sequence: Synthetic epitope
TMKSTLKEQF

SEQ ID NO: 51123 - protein, 10 aa, Artificial Sequence
  Description of Artificial Sequence: Synthetic epitope
TMKSVNDQPS

SEQ ID NO: 51124 - protein, 10 aa, Artificial Sequence
  Description of Artificial Sequence: Synthetic epitope
TMKTMEDKLS

SEQ ID NO: 51125 - protein, 10 aa, Artificial Sequence
  Description of Artificial Sequence: Synthetic epitope
TMKTSKKGSK

SEQ ID NO: 51126 - protein, 10 aa, Artificial Sequence
  Description of Artificial Sequence: Synthetic epitope
TMKVRSGRYD

SEQ ID NO: 51127 - protein, 10 aa, Artificial Sequence
  Description of Artificial Sequence: Synthetic epitope
TMLATKTVKH

SEQ ID NO: 51128 - protein, 10 aa, Artificial Sequence
  Description of Artificial Sequence: Synthetic epitope
TMLELESIHI

SEQ ID NO: 51129 - protein, 10 aa, Artificial Sequence
  Description of Artificial Sequence: Synthetic epitope
TMLIHSSESE

SEQ ID NO: 51130 - protein, 10 aa, Artificial Sequence
  Description of Artificial Sequence: Synthetic epitope
TMLPTFIAKV

SEQ ID NO: 51131 - protein, 10 aa, Artificial Sequence
  Description of Artificial Sequence: Synthetic epitope
TMLQAQLSLE

SEQ ID NO: 51132 - protein, 10 aa, Artificial Sequence
  Description of Artificial Sequence: Synthetic epitope
TMLQEEKEEQ

SEQ ID NO: 51133 - protein, 10 aa, Artificial Sequence
  Description of Artificial Sequence: Synthetic epitope
TMLSKTSTSY

SEQ ID NO: 51134 - protein, 10 aa, Artificial Sequence
  Description of Artificial Sequence: Synthetic epitope
TMMASHYKQH

SEQ ID NO: 51135 - protein, 10 aa, Artificial Sequence
  Description of Artificial Sequence: Synthetic epitope
TMMNSQFSGH

SEQ ID NO: 51136 - protein, 10 aa, Artificial Sequence
  Description of Artificial Sequence: Synthetic epitope
TMMRGLELLI

SEQ ID NO: 51137 - protein, 10 aa, Artificial Sequence
  Description of Artificial Sequence: Synthetic epitope
TMNKLATAMQ

SEQ ID NO: 51138 - protein, 10 aa, Artificial Sequence
  Description of Artificial Sequence: Synthetic epitope
TMNSSTPSTA

SEQ ID NO: 51139 - protein, 10 aa, Artificial Sequence
  Description of Artificial Sequence: Synthetic epitope
TMNVMITNTN

SEQ ID NO: 51140 - protein, 10 aa, Artificial Sequence
  Description of Artificial Sequence: Synthetic epitope
TMPPMAVALK

SEQ ID NO: 51141 - protein, 10 aa, Artificial Sequence
  Description of Artificial Sequence: Synthetic epitope
TMPSSVLKQG

SEQ ID NO: 51142 - protein, 10 aa, Artificial Sequence
  Description of Artificial Sequence: Synthetic epitope
TMQITALNEN

SEQ ID NO: 51143 - protein, 10 aa, Artificial Sequence
  Description of Artificial Sequence: Synthetic epitope
TMQQAKRRQK

SEQ ID NO: 51144 - protein, 10 aa, Artificial Sequence
  Description of Artificial Sequence: Synthetic epitope
TMQQTTALPT

SEQ ID NO: 51145 - protein, 10 aa, Artificial Sequence
  Description of Artificial Sequence: Synthetic epitope
TMQSGRQSYE

SEQ ID NO: 51146 - protein, 10 aa, Artificial Sequence
  Description of Artificial Sequence: Synthetic epitope
TMQSKLIQKG

SEQ ID NO: 51147 - protein, 10 aa, Artificial Sequence
  Description of Artificial Sequence: Synthetic epitope
TMQTLVLLVD

SEQ ID NO: 51148 - protein, 10 aa, Artificial Sequence
  Description of Artificial Sequence: Synthetic epitope
TMQVKITSPG

SEQ ID NO: 51149 - protein, 10 aa, Artificial Sequence
  Description of Artificial Sequence: Synthetic epitope
TMQVSQLDLF

SEQ ID NO: 51150 - protein, 10 aa, Artificial Sequence
  Description of Artificial Sequence: Synthetic epitope
TMQVSSLQRE

SEQ ID NO: 51151 - protein, 10 aa, Artificial Sequence
  Description of Artificial Sequence: Synthetic epitope
TMRAQWTYSL

SEQ ID NO: 51152 - protein, 10 aa, Artificial Sequence
  Description of Artificial Sequence: Synthetic epitope
TMRDEQSAVI

SEQ ID NO: 51153 - protein, 10 aa, Artificial Sequence
  Description of Artificial Sequence: Synthetic epitope
TMRESSPKQY

SEQ ID NO: 51154 - protein, 10 aa, Artificial Sequence
  Description of Artificial Sequence: Synthetic epitope
TMRFAASQGK

SEQ ID NO: 51155 - protein, 10 aa, Artificial Sequence
  Description of Artificial Sequence: Synthetic epitope
TMRKYKLKNM

SEQ ID NO: 51156 - protein, 10 aa, Artificial Sequence
  Description of Artificial Sequence: Synthetic epitope
TMRNSVKSSF

SEQ ID NO: 51157 - protein, 10 aa, Artificial Sequence
  Description of Artificial Sequence: Synthetic epitope
TMRSAQILAS

SEQ ID NO: 51158 - protein, 10 aa, Artificial Sequence
  Description of Artificial Sequence: Synthetic epitope
TMRSQKGAQP

SEQ ID NO: 51159 - protein, 10 aa, Artificial Sequence
  Description of Artificial Sequence: Synthetic epitope
TMSLSELGAA

SEQ ID NO: 51160 - protein, 10 aa, Artificial Sequence
  Description of Artificial Sequence: Synthetic epitope
TMSNKFTQKG

SEQ ID NO: 51161 - protein, 10 aa, Artificial Sequence
  Description of Artificial Sequence: Synthetic epitope
TMSPSTTDHT

SEQ ID NO: 51162 - protein, 10 aa, Artificial Sequence
  Description of Artificial Sequence: Synthetic epitope
TMSPTLSSIT

SEQ ID NO: 51163 - protein, 10 aa, Artificial Sequence
  Description of Artificial Sequence: Synthetic epitope
TMTGGRAQSI

SEQ ID NO: 51164 - protein, 10 aa, Artificial Sequence
  Description of Artificial Sequence: Synthetic epitope
TMTLSRGKVD

SEQ ID NO: 51165 - protein, 10 aa, Artificial Sequence
  Description of Artificial Sequence: Synthetic epitope
TMTSLSKVTT

SEQ ID NO: 51166 - protein, 10 aa, Artificial Sequence
  Description of Artificial Sequence: Synthetic epitope
TMTSVLQQLS

SEQ ID NO: 51167 - protein, 10 aa, Artificial Sequence
  Description of Artificial Sequence: Synthetic epitope
TMTTPQVLKL

SEQ ID NO: 51168 - protein, 10 aa, Artificial Sequence
  Description of Artificial Sequence: Synthetic epitope
TMTVNRQMKR

SEQ ID NO: 51169 - protein, 10 aa, Artificial Sequence
  Description of Artificial Sequence: Synthetic epitope
TMVLKTYDTS

SEQ ID NO: 51170 - protein, 10 aa, Artificial Sequence
  Description of Artificial Sequence: Synthetic epitope
TMVPQASEIL

SEQ ID NO: 51171 - protein, 10 aa, Artificial Sequence
  Description of Artificial Sequence: Synthetic epitope
TMVSTRFQKE

SEQ ID NO: 51172 - protein, 10 aa, Artificial Sequence
  Description of Artificial Sequence: Synthetic epitope
TMVTEQATQG

SEQ ID NO: 51173 - protein, 10 aa, Artificial Sequence
  Description of Artificial Sequence: Synthetic epitope
  MOD_RES (8)..(8): Any amino acid
TMVTSTSXIP

SEQ ID NO: 51174 - protein, 10 aa, Artificial Sequence
  Description of Artificial Sequence: Synthetic epitope
TMWSPNDNND

SEQ ID NO: 51175 - protein, 10 aa, Artificial Sequence
  Description of Artificial Sequence: Synthetic epitope
TNAAKALGTT

SEQ ID NO: 51176 - protein, 10 aa, Artificial Sequence
  Description of Artificial Sequence: Synthetic epitope
TNADSATRLL

SEQ ID NO: 51177 - protein, 10 aa, Artificial Sequence
  Description of Artificial Sequence: Synthetic epitope
TNAKSKFQKG

SEQ ID NO: 51178 - protein, 10 aa, Artificial Sequence
  Description of Artificial Sequence: Synthetic epitope
TNALQKAQEA

SEQ ID NO: 51179 - protein, 10 aa, Artificial Sequence
  Description of Artificial Sequence: Synthetic epitope
TNALQSQTRN

SEQ ID NO: 51180 - protein, 10 aa, Artificial Sequence
  Description of Artificial Sequence: Synthetic epitope
TNAMLISAGL

SEQ ID NO: 51181 - protein, 10 aa, Artificial Sequence
  Description of Artificial Sequence: Synthetic epitope
TNAVKELEKL

SEQ ID NO: 51182 - protein, 10 aa, Artificial Sequence
  Description of Artificial Sequence: Synthetic epitope
TNAVTLQQHV

SEQ ID NO: 51183 - protein, 10 aa, Artificial Sequence
  Description of Artificial Sequence: Synthetic epitope
TNDAQASTSG

SEQ ID NO: 51184 - protein, 10 aa, Artificial Sequence
  Description of Artificial Sequence: Synthetic epitope
TNDSNTVQLP

SEQ ID NO: 51185 - protein, 10 aa, Artificial Sequence
  Description of Artificial Sequence: Synthetic epitope
TNDSVVADKS

SEQ ID NO: 51186 - protein, 10 aa, Artificial Sequence
  Description of Artificial Sequence: Synthetic epitope
TNDVKQWVYA

SEQ ID NO: 51187 - protein, 10 aa, Artificial Sequence
  Description of Artificial Sequence: Synthetic epitope
TNEGAKALLE

SEQ ID NO: 51188 - protein, 10 aa, Artificial Sequence
  Description of Artificial Sequence: Synthetic epitope
TNEINTVSIQ

SEQ ID NO: 51189 - protein, 10 aa, Artificial Sequence
  Description of Artificial Sequence: Synthetic epitope
TNEKSQNYSQ

SEQ ID NO: 51190 - protein, 10 aa, Artificial Sequence
  Description of Artificial Sequence: Synthetic epitope
TNENIEQAHE

SEQ ID NO: 51191 - protein, 10 aa, Artificial Sequence
  Description of Artificial Sequence: Synthetic epitope
TNESSTEDIA

SEQ ID NO: 51192 - protein, 10 aa, Artificial Sequence
  Description of Artificial Sequence: Synthetic epitope
TNETFRKTQL

SEQ ID NO: 51193 - protein, 10 aa, Artificial Sequence
  Description of Artificial Sequence: Synthetic epitope
TNFEQELSEQ

SEQ ID NO: 51194 - protein, 10 aa, Artificial Sequence
  Description of Artificial Sequence: Synthetic epitope
TNFKSSEIEQ

SEQ ID NO: 51195 - protein, 10 aa, Artificial Sequence
  Description of Artificial Sequence: Synthetic epitope
TNFKTTIADI

SEQ ID NO: 51196 - protein, 10 aa, Artificial Sequence
  Description of Artificial Sequence: Synthetic epitope
TNFLSTLSPE

SEQ ID NO: 51197 - protein, 10 aa, Artificial Sequence
  Description of Artificial Sequence: Synthetic epitope
TNFNTSVSQE

SEQ ID NO: 51198 - protein, 10 aa, Artificial Sequence
  Description of Artificial Sequence: Synthetic epitope
TNFSESVEHR

SEQ ID NO: 51199 - protein, 10 aa, Artificial Sequence
  Description of Artificial Sequence: Synthetic epitope
TNGAAYSNQA

SEQ ID NO: 51200 - protein, 10 aa, Artificial Sequence
  Description of Artificial Sequence: Synthetic epitope
TNGAQRHSHN

SEQ ID NO: 51201 - protein, 10 aa, Artificial Sequence
  Description of Artificial Sequence: Synthetic epitope
TNGEMAELSQ

SEQ ID NO: 51202 - protein, 10 aa, Artificial Sequence
  Description of Artificial Sequence: Synthetic epitope
TNGNAVAQAP

SEQ ID NO: 51203 - protein, 10 aa, Artificial Sequence
  Description of Artificial Sequence: Synthetic epitope
TNGSELVTVQ

SEQ ID NO: 51204 - protein, 10 aa, Artificial Sequence
  Description of Artificial Sequence: Synthetic epitope
TNGSEVQSSW

SEQ ID NO: 51205 - protein, 10 aa, Artificial Sequence
  Description of Artificial Sequence: Synthetic epitope
TNGSLNGTSE

SEQ ID NO: 51206 - protein, 10 aa, Artificial Sequence
  Description of Artificial Sequence: Synthetic epitope
TNHDHQIRVG

SEQ ID NO: 51207 - protein, 10 aa, Artificial Sequence
  Description of Artificial Sequence: Synthetic epitope
TNHGIQAKEM

SEQ ID NO: 51208 - protein, 10 aa, Artificial Sequence
  Description of Artificial Sequence: Synthetic epitope
TNHLKSLKRD

SEQ ID NO: 51209 - protein, 10 aa, Artificial Sequence
  Description of Artificial Sequence: Synthetic epitope
TNHNFSITSS

SEQ ID NO: 51210 - protein, 10 aa, Artificial Sequence
  Description of Artificial Sequence: Synthetic epitope
TNHQLSTTEW

SEQ ID NO: 51211 - protein, 10 aa, Artificial Sequence
  Description of Artificial Sequence: Synthetic epitope
TNHSKHYDQY

SEQ ID NO: 51212 - protein, 10 aa, Artificial Sequence
  Description of Artificial Sequence: Synthetic epitope
TNHSNIMDDP

SEQ ID NO: 51213 - protein, 10 aa, Artificial Sequence
  Description of Artificial Sequence: Synthetic epitope
TNIKYSLADQ

SEQ ID NO: 51214 - protein, 10 aa, Artificial Sequence
  Description of Artificial Sequence: Synthetic epitope
TNILHKTDQT

SEQ ID NO: 51215 - protein, 10 aa, Artificial Sequence
  Description of Artificial Sequence: Synthetic epitope
TNILLRIQSS

SEQ ID NO: 51216 - protein, 10 aa, Artificial Sequence
  Description of Artificial Sequence: Synthetic epitope
TNINMQSNPV

SEQ ID NO: 51217 - protein, 10 aa, Artificial Sequence
  Description of Artificial Sequence: Synthetic epitope
TNIREKNSQA

SEQ ID NO: 51218 - protein, 10 aa, Artificial Sequence
  Description of Artificial Sequence: Synthetic epitope
TNISKQQAEQ

SEQ ID NO: 51219 - protein, 10 aa, Artificial Sequence
  Description of Artificial Sequence: Synthetic epitope
TNITEDVSAH

SEQ ID NO: 51220 - protein, 10 aa, Artificial Sequence
  Description of Artificial Sequence: Synthetic epitope
TNKISRPYKM

SEQ ID NO: 51221 - protein, 10 aa, Artificial Sequence
  Description of Artificial Sequence: Synthetic epitope
TNKSIAQGII

SEQ ID NO: 51222 - protein, 10 aa, Artificial Sequence
  Description of Artificial Sequence: Synthetic epitope
TNKSVSDDSE

SEQ ID NO: 51223 - protein, 10 aa, Artificial Sequence
  Description of Artificial Sequence: Synthetic epitope
TNKVETYKEQ

SEQ ID NO: 51224 - protein, 10 aa, Artificial Sequence
  Description of Artificial Sequence: Synthetic epitope
TNLATVREPR

SEQ ID NO: 51225 - protein, 10 aa, Artificial Sequence
  Description of Artificial Sequence: Synthetic epitope
TNLAVSKLET

SEQ ID NO: 51226 - protein, 10 aa, Artificial Sequence
  Description of Artificial Sequence: Synthetic epitope
TNLDASNTQN

SEQ ID NO: 51227 - protein, 10 aa, Artificial Sequence
  Description of Artificial Sequence: Synthetic epitope
TNLDFKVPNG

SEQ ID NO: 51228 - protein, 10 aa, Artificial Sequence
  Description of Artificial Sequence: Synthetic epitope
TNLDNEAMQQ

SEQ ID NO: 51229 - protein, 10 aa, Artificial Sequence
  Description of Artificial Sequence: Synthetic epitope
TNLELLSLSF

SEQ ID NO: 51230 - protein, 10 aa, Artificial Sequence
  Description of Artificial Sequence: Synthetic epitope
TNLIKLTVTM

SEQ ID NO: 51231 - protein, 10 aa, Artificial Sequence
  Description of Artificial Sequence: Synthetic epitope
TNLKDKSSLV

SEQ ID NO: 51232 - protein, 10 aa, Artificial Sequence
  Description of Artificial Sequence: Synthetic epitope
TNLNVNTSNR

SEQ ID NO: 51233 - protein, 10 aa, Artificial Sequence
  Description of Artificial Sequence: Synthetic epitope
TNLQESLRSK

SEQ ID NO: 51234 - protein, 10 aa, Artificial Sequence
  Description of Artificial Sequence: Synthetic epitope
TNLSARSSPE

SEQ ID NO: 51235 - protein, 10 aa, Artificial Sequence
  Description of Artificial Sequence: Synthetic epitope
TNLTMDDGPP

SEQ ID NO: 51236 - protein, 10 aa, Artificial Sequence
  Description of Artificial Sequence: Synthetic epitope
TNLTMDTEIR

SEQ ID NO: 51237 - protein, 10 aa, Artificial Sequence
  Description of Artificial Sequence: Synthetic epitope
TNMEVALDKA

SEQ ID NO: 51238 - protein, 10 aa, Artificial Sequence
  Description of Artificial Sequence: Synthetic epitope
TNMGNLAVLS

SEQ ID NO: 51239 - protein, 10 aa, Artificial Sequence
  Description of Artificial Sequence: Synthetic epitope
TNMSVTASGV

SEQ ID NO: 51240 - protein, 10 aa, Artificial Sequence
  Description of Artificial Sequence: Synthetic epitope
TNNDKEVNAE

SEQ ID NO: 51241 - protein, 10 aa, Artificial Sequence
  Description of Artificial Sequence: Synthetic epitope
TNNLQASLKS

SEQ ID NO: 51242 - protein, 10 aa, Artificial Sequence
  Description of Artificial Sequence: Synthetic epitope
TNNQKKAQDS

SEQ ID NO: 51243 - protein, 10 aa, Artificial Sequence
  Description of Artificial Sequence: Synthetic epitope
TNNSEELSNS

SEQ ID NO: 51244 - protein, 10 aa, Artificial Sequence
  Description of Artificial Sequence: Synthetic epitope
TNNYKSLKPK

SEQ ID NO: 51245 - protein, 10 aa, Artificial Sequence
  Description of Artificial Sequence: Synthetic epitope
TNNYKSLKPK

SEQ ID NO: 51246 - protein, 10 aa, Artificial Sequence
  Description of Artificial Sequence: Synthetic epitope
TNPDKIAQRK

SEQ ID NO: 51247 - protein, 10 aa, Artificial Sequence
  Description of Artificial Sequence: Synthetic epitope
TNPTKNLVSI

SEQ ID NO: 51248 - protein, 10 aa, Artificial Sequence
  Description of Artificial Sequence: Synthetic epitope
TNQAIITPSP

SEQ ID NO: 51249 - protein, 10 aa, Artificial Sequence
  Description of Artificial Sequence: Synthetic epitope
TNQESKVKSP

SEQ ID NO: 51250 - protein, 10 aa, Artificial Sequence
  Description of Artificial Sequence: Synthetic epitope
TNQETITAEQ

SEQ ID NO: 51251 - protein, 10 aa, Artificial Sequence
  Description of Artificial Sequence: Synthetic epitope
TNQFSEALSY

SEQ ID NO: 51252 - protein, 10 aa, Artificial Sequence
  Description of Artificial Sequence: Synthetic epitope
TNQGNQIVSL

SEQ ID NO: 51253 - protein, 10 aa, Artificial Sequence
  Description of Artificial Sequence: Synthetic epitope
TNQIDLLQAE

SEQ ID NO: 51254 - protein, 10 aa, Artificial Sequence
  Description of Artificial Sequence: Synthetic epitope
TNQMSTETEM

SEQ ID NO: 51255 - protein, 10 aa, Artificial Sequence
  Description of Artificial Sequence: Synthetic epitope
TNQNDELEEK

SEQ ID NO: 51256 - protein, 10 aa, Artificial Sequence
  Description of Artificial Sequence: Synthetic epitope
TNQNISIKSE

SEQ ID NO: 51257 - protein, 10 aa, Artificial Sequence
  Description of Artificial Sequence: Synthetic epitope
TNQSMVKMVS

SEQ ID NO: 51258 - protein, 10 aa, Artificial Sequence
  Description of Artificial Sequence: Synthetic epitope
TNRKPQSKEL

SEQ ID NO: 51259 - protein, 10 aa, Artificial Sequence
  Description of Artificial Sequence: Synthetic epitope
TNRQDYIQMI

SEQ ID NO: 51260 - protein, 10 aa, Artificial Sequence
  Description of Artificial Sequence: Synthetic epitope
TNRSSTDTAS

SEQ ID NO: 51261 - protein, 10 aa, Artificial Sequence
  Description of Artificial Sequence: Synthetic epitope
TNRVEFLEEH

SEQ ID NO: 51262 - protein, 10 aa, Artificial Sequence
  Description of Artificial Sequence: Synthetic epitope
TNSAEVAKHS

SEQ ID NO: 51263 - protein, 10 aa, Artificial Sequence
  Description of Artificial Sequence: Synthetic epitope
TNSETAVVAL

SEQ ID NO: 51264 - protein, 10 aa, Artificial Sequence
  Description of Artificial Sequence: Synthetic epitope
TNSFTKMQPP

SEQ ID NO: 51265 - protein, 10 aa, Artificial Sequence
  Description of Artificial Sequence: Synthetic epitope
TNSIISSQIP

SEQ ID NO: 51266 - protein, 10 aa, Artificial Sequence
  Description of Artificial Sequence: Synthetic epitope
TNSKDGVAVI

SEQ ID NO: 51267 - protein, 10 aa, Artificial Sequence
  Description of Artificial Sequence: Synthetic epitope
TNSMGSATGP

SEQ ID NO: 51268 - protein, 10 aa, Artificial Sequence
  Description of Artificial Sequence: Synthetic epitope
TNSMKKTKSP

SEQ ID NO: 51269 - protein, 10 aa, Artificial Sequence
  Description of Artificial Sequence: Synthetic epitope
TNSRNKIKQV

SEQ ID NO: 51270 - protein, 10 aa, Artificial Sequence
  Description of Artificial Sequence: Synthetic epitope
TNSRVTASSG

SEQ ID NO: 51271 - protein, 10 aa, Artificial Sequence
  Description of Artificial Sequence: Synthetic epitope
TNSSKLQQYE

SEQ ID NO: 51272 - protein, 10 aa, Artificial Sequence
  Description of Artificial Sequence: Synthetic epitope
TNSSTSENRA

SEQ ID NO: 51273 - protein, 10 aa, Artificial Sequence
  Description of Artificial Sequence: Synthetic epitope
TNSTKSVPNS

SEQ ID NO: 51274 - protein, 10 aa, Artificial Sequence
  Description of Artificial Sequence: Synthetic epitope
TNSTNSTTAV

SEQ ID NO: 51275 - protein, 10 aa, Artificial Sequence
  Description of Artificial Sequence: Synthetic epitope
TNSTSVTSST

SEQ ID NO: 51276 - protein, 10 aa, Artificial Sequence
  Description of Artificial Sequence: Synthetic epitope
TNTEPNTKIT

SEQ ID NO: 51277 - protein, 10 aa, Artificial Sequence
  Description of Artificial Sequence: Synthetic epitope
TNTEQLQSSK

SEQ ID NO: 51278 - protein, 10 aa, Artificial Sequence
  Description of Artificial Sequence: Synthetic epitope
TNTETSEETR

SEQ ID NO: 51279 - protein, 10 aa, Artificial Sequence
  Description of Artificial Sequence: Synthetic epitope
TNTGASTLVI

SEQ ID NO: 51280 - protein, 10 aa, Artificial Sequence
  Description of Artificial Sequence: Synthetic epitope
TNTIDTLNMQ

SEQ ID NO: 51281 - protein, 10 aa, Artificial Sequence
  Description of Artificial Sequence: Synthetic epitope
TNTILLSSEK

SEQ ID NO: 51282 - protein, 10 aa, Artificial Sequence
  Description of Artificial Sequence: Synthetic epitope
TNTINTSSDK

SEQ ID NO: 51283 - protein, 10 aa, Artificial Sequence
  Description of Artificial Sequence: Synthetic epitope
TNTLMVALSS

SEQ ID NO: 51284 - protein, 10 aa, Artificial Sequence
  Description of Artificial Sequence: Synthetic epitope
TNTLRILALE

SEQ ID NO: 51285 - protein, 10 aa, Artificial Sequence
  Description of Artificial Sequence: Synthetic epitope
TNTLTRIAEN

SEQ ID NO: 51286 - protein, 10 aa, Artificial Sequence
  Description of Artificial Sequence: Synthetic epitope
TNTMNGSKSP

SEQ ID NO: 51287 - protein, 10 aa, Artificial Sequence
  Description of Artificial Sequence: Synthetic epitope
TNTSIKTQHS

SEQ ID NO: 51288 - protein, 10 aa, Artificial Sequence
  Description of Artificial Sequence: Synthetic epitope
TNTSLDAASE

SEQ ID NO: 51289 - protein, 10 aa, Artificial Sequence
  Description of Artificial Sequence: Synthetic epitope
TNTSPTLSQS

SEQ ID NO: 51290 - protein, 10 aa, Artificial Sequence
  Description of Artificial Sequence: Synthetic epitope
TNTTRSVLKD

SEQ ID NO: 51291 - protein, 10 aa, Artificial Sequence
  Description of Artificial Sequence: Synthetic epitope
TNTVAAYNLT

SEQ ID NO: 51292 - protein, 10 aa, Artificial Sequence
  Description of Artificial Sequence: Synthetic epitope
TNTVEDIQID

SEQ ID NO: 51293 - protein, 10 aa, Artificial Sequence
  Description of Artificial Sequence: Synthetic epitope
TNTVGEVIEA

SEQ ID NO: 51294 - protein, 10 aa, Artificial Sequence
  Description of Artificial Sequence: Synthetic epitope
TNVAINIPRL

SEQ ID NO: 51295 - protein, 10 aa, Artificial Sequence
  Description of Artificial Sequence: Synthetic epitope
TNVFAILSAK

SEQ ID NO: 51296 - protein, 10 aa, Artificial Sequence
  Description of Artificial Sequence: Synthetic epitope
TNVIKFSDPQ

SEQ ID NO: 51297 - protein, 10 aa, Artificial Sequence
  Description of Artificial Sequence: Synthetic epitope
TNVKVTLRLD

SEQ ID NO: 51298 - protein, 10 aa, Artificial Sequence
  Description of Artificial Sequence: Synthetic epitope
TNVLAEQDLN

SEQ ID NO: 51299 - protein, 10 aa, Artificial Sequence
  Description of Artificial Sequence: Synthetic epitope
TNVLGLSSAY

SEQ ID NO: 51300 - protein, 10 aa, Artificial Sequence
  Description of Artificial Sequence: Synthetic epitope
TNVRSADQEN

SEQ ID NO: 51301 - protein, 10 aa, Artificial Sequence
  Description of Artificial Sequence: Synthetic epitope
TNVSSFSLVS

SEQ ID NO: 51302 - protein, 10 aa, Artificial Sequence
  Description of Artificial Sequence: Synthetic epitope
TNVWKIESQR

SEQ ID NO: 51303 - protein, 10 aa, Artificial Sequence
  Description of Artificial Sequence: Synthetic epitope
TNWVEYNVTG

SEQ ID NO: 51304 - protein, 10 aa, Artificial Sequence
  Description of Artificial Sequence: Synthetic epitope
TPAAEVLYTV

SEQ ID NO: 51305 - protein, 10 aa, Artificial Sequence
  Description of Artificial Sequence: Synthetic epitope
TPAELIERLE

SEQ ID NO: 51306 - protein, 10 aa, Artificial Sequence
  Description of Artificial Sequence: Synthetic epitope
TPAITIKESV

SEQ ID NO: 51307 - protein, 10 aa, Artificial Sequence
  Description of Artificial Sequence: Synthetic epitope
TPALADVLPQ

SEQ ID NO: 51308 - protein, 10 aa, Artificial Sequence
  Description of Artificial Sequence: Synthetic epitope
TPAMKQIKRK

SEQ ID NO: 51309 - protein, 10 aa, Artificial Sequence
  Description of Artificial Sequence: Synthetic epitope
TPAMSISASA

SEQ ID NO: 51310 - protein, 10 aa, Artificial Sequence
  Description of Artificial Sequence: Synthetic epitope
TPANKLKNKE

SEQ ID NO: 51311 - protein, 10 aa, Artificial Sequence
  Description of Artificial Sequence: Synthetic epitope
TPARLATTEK

SEQ ID NO: 51312 - protein, 10 aa, Artificial Sequence
  Description of Artificial Sequence: Synthetic epitope
TPASNTQSPQ

SEQ ID NO: 51313 - protein, 10 aa, Artificial Sequence
  Description of Artificial Sequence: Synthetic epitope
TPATSSTAMP

SEQ ID NO: 51314 - protein, 10 aa, Artificial Sequence
  Description of Artificial Sequence: Synthetic epitope
TPATSSTAMP

SEQ ID NO: 51315 - protein, 10 aa, Artificial Sequence
  Description of Artificial Sequence: Synthetic epitope
TPAVKYKYSA

SEQ ID NO: 51316 - protein, 10 aa, Artificial Sequence
  Description of Artificial Sequence: Synthetic epitope
TPDEARVEEF

SEQ ID NO: 51317 - protein, 10 aa, Artificial Sequence
  Description of Artificial Sequence: Synthetic epitope
TPDEQLEMAN

SEQ ID NO: 51318 - protein, 10 aa, Artificial Sequence
  Description of Artificial Sequence: Synthetic epitope
TPDGATQTIA

SEQ ID NO: 51319 - protein, 10 aa, Artificial Sequence
  Description of Artificial Sequence: Synthetic epitope
TPDIKQWRLI

SEQ ID NO: 51320 - protein, 10 aa, Artificial Sequence
  Description of Artificial Sequence: Synthetic epitope
TPDKHDNSQG

SEQ ID NO: 51321 - protein, 10 aa, Artificial Sequence
  Description of Artificial Sequence: Synthetic epitope
TPDSKKEESF

SEQ ID NO: 51322 - protein, 10 aa, Artificial Sequence
  Description of Artificial Sequence: Synthetic epitope
TPDSTRSARS

SEQ ID NO: 51323 - protein, 10 aa, Artificial Sequence
  Description of Artificial Sequence: Synthetic epitope
TPEASATNSP

SEQ ID NO: 51324 - protein, 10 aa, Artificial Sequence
  Description of Artificial Sequence: Synthetic epitope
TPEATQPISQ

SEQ ID NO: 51325 - protein, 10 aa, Artificial Sequence
  Description of Artificial Sequence: Synthetic epitope
TPEAVESPQE

SEQ ID NO: 51326 - protein, 10 aa, Artificial Sequence
  Description of Artificial Sequence: Synthetic epitope
TPEDEKTKLI

SEQ ID NO: 51327 - protein, 10 aa, Artificial Sequence
  Description of Artificial Sequence: Synthetic epitope
TPEEMSLKEE

SEQ ID NO: 51328 - protein, 10 aa, Artificial Sequence
  Description of Artificial Sequence: Synthetic epitope
TPEGFIQLME

SEQ ID NO: 51329 - protein, 10 aa, Artificial Sequence
  Description of Artificial Sequence: Synthetic epitope
TPEIAEQRGE

SEQ ID NO: 51330 - protein, 10 aa, Artificial Sequence
  Description of Artificial Sequence: Synthetic epitope
TPELPKSLQP

SEQ ID NO: 51331 - protein, 10 aa, Artificial Sequence
  Description of Artificial Sequence: Synthetic epitope
TPEMKTSDTQ

SEQ ID NO: 51332 - protein, 10 aa, Artificial Sequence
  Description of Artificial Sequence: Synthetic epitope
TPEPVSVVAA

SEQ ID NO: 51333 - protein, 10 aa, Artificial Sequence
  Description of Artificial Sequence: Synthetic epitope
TPEQKQKKAA

SEQ ID NO: 51334 - protein, 10 aa, Artificial Sequence
  Description of Artificial Sequence: Synthetic epitope
TPESRAAVQE

SEQ ID NO: 51335 - protein, 10 aa, Artificial Sequence
  Description of Artificial Sequence: Synthetic epitope
TPESTMTSGQ

SEQ ID NO: 51336 - protein, 10 aa, Artificial Sequence
  Description of Artificial Sequence: Synthetic epitope
TPEVQSEQSS

SEQ ID NO: 51337 - protein, 10 aa, Artificial Sequence
  Description of Artificial Sequence: Synthetic epitope
TPEVVQSTRP

SEQ ID NO: 51338 - protein, 10 aa, Artificial Sequence
  Description of Artificial Sequence: Synthetic epitope
TPEVWPNVDN

SEQ ID NO: 51339 - protein, 10 aa, Artificial Sequence
  Description of Artificial Sequence: Synthetic epitope
TPFSSTEYSS

SEQ ID NO: 51340 - protein, 10 aa, Artificial Sequence
  Description of Artificial Sequence: Synthetic epitope
TPFTAQQRQA

SEQ ID NO: 51341 - protein, 10 aa, Artificial Sequence
  Description of Artificial Sequence: Synthetic epitope
TPFTSGDKIG

SEQ ID NO: 51342 - protein, 10 aa, Artificial Sequence
  Description of Artificial Sequence: Synthetic epitope
TPGASAALPG

SEQ ID NO: 51343 - protein, 10 aa, Artificial Sequence
  Description of Artificial Sequence: Synthetic epitope
TPGDSAIAPP

SEQ ID NO: 51344 - protein, 10 aa, Artificial Sequence
  Description of Artificial Sequence: Synthetic epitope
TPGEATTESS

SEQ ID NO: 51345 - protein, 10 aa, Artificial Sequence
  Description of Artificial Sequence: Synthetic epitope
TPGGIKKRRI

SEQ ID NO: 51346 - protein, 10 aa, Artificial Sequence
  Description of Artificial Sequence: Synthetic epitope
TPGLQKFSKT

SEQ ID NO: 51347 - protein, 10 aa, Artificial Sequence
  Description of Artificial Sequence: Synthetic epitope
TPGVNQTKFY

SEQ ID NO: 51348 - protein, 10 aa, Artificial Sequence
  Description of Artificial Sequence: Synthetic epitope
TPHTLVQPIP

SEQ ID NO: 51349 - protein, 10 aa, Artificial Sequence
  Description of Artificial Sequence: Synthetic epitope
TPIRRLIRNV

SEQ ID NO: 51350 - protein, 10 aa, Artificial Sequence
  Description of Artificial Sequence: Synthetic epitope
TPITQQASLT

SEQ ID NO: 51351 - protein, 10 aa, Artificial Sequence
  Description of Artificial Sequence: Synthetic epitope
TPITTKLTVS

SEQ ID NO: 51352 - protein, 10 aa, Artificial Sequence
  Description of Artificial Sequence: Synthetic epitope
TPIYPSSNTL

SEQ ID NO: 51353 - protein, 10 aa, Artificial Sequence
  Description of Artificial Sequence: Synthetic epitope
TPKAELSNHT

SEQ ID NO: 51354 - protein, 10 aa, Artificial Sequence
  Description of Artificial Sequence: Synthetic epitope
TPKEMFITVE

SEQ ID NO: 51355 - protein, 10 aa, Artificial Sequence
  Description of Artificial Sequence: Synthetic epitope
TPKGRALVPD

SEQ ID NO: 51356 - protein, 10 aa, Artificial Sequence
  Description of Artificial Sequence: Synthetic epitope
TPKKAKKPAA

SEQ ID NO: 51357 - protein, 10 aa, Artificial Sequence
  Description of Artificial Sequence: Synthetic epitope
TPKKAKKPAA

SEQ ID NO: 51358 - protein, 10 aa, Artificial Sequence
  Description of Artificial Sequence: Synthetic epitope
TPKKAKKPAA

SEQ ID NO: 51359 - protein, 10 aa, Artificial Sequence
  Description of Artificial Sequence: Synthetic epitope
TPKKAKKPAA

SEQ ID NO: 51360 - protein, 10 aa, Artificial Sequence
  Description of Artificial Sequence: Synthetic epitope
TPKLDKMLDP

SEQ ID NO: 51361 - protein, 10 aa, Artificial Sequence
  Description of Artificial Sequence: Synthetic epitope
TPKTADSQET

SEQ ID NO: 51362 - protein, 10 aa, Artificial Sequence
  Description of Artificial Sequence: Synthetic epitope
TPLISTKVQD

SEQ ID NO: 51363 - protein, 10 aa, Artificial Sequence
  Description of Artificial Sequence: Synthetic epitope
TPLKPSAQTT

SEQ ID NO: 51364 - protein, 10 aa, Artificial Sequence
  Description of Artificial Sequence: Synthetic epitope
TPLKVTSIAR

SEQ ID NO: 51365 - protein, 10 aa, Artificial Sequence
  Description of Artificial Sequence: Synthetic epitope
TPLKYNTERI

SEQ ID NO: 51366 - protein, 10 aa, Artificial Sequence
  Description of Artificial Sequence: Synthetic epitope
TPLLKKINPT

SEQ ID NO: 51367 - protein, 10 aa, Artificial Sequence
  Description of Artificial Sequence: Synthetic epitope
TPLNESLQPL

SEQ ID NO: 51368 - protein, 10 aa, Artificial Sequence
  Description of Artificial Sequence: Synthetic epitope
TPLNMVVQAT

SEQ ID NO: 51369 - protein, 10 aa, Artificial Sequence
  Description of Artificial Sequence: Synthetic epitope
TPLPQAQEDA

SEQ ID NO: 51370 - protein, 10 aa, Artificial Sequence
  Description of Artificial Sequence: Synthetic epitope
TPLTTLLVST

SEQ ID NO: 51371 - protein, 10 aa, Artificial Sequence
  Description of Artificial Sequence: Synthetic epitope
TPLVVTSTVT

SEQ ID NO: 51372 - protein, 10 aa, Artificial Sequence
  Description of Artificial Sequence: Synthetic epitope
TPMEVTAEKR

SEQ ID NO: 51373 - protein, 10 aa, Artificial Sequence
  Description of Artificial Sequence: Synthetic epitope
TPMSLSPSQS

SEQ ID NO: 51374 - protein, 10 aa, Artificial Sequence
  Description of Artificial Sequence: Synthetic epitope
TPMYTSENRQ

SEQ ID NO: 51375 - protein, 10 aa, Artificial Sequence
  Description of Artificial Sequence: Synthetic epitope
TPNAQFITRS

SEQ ID NO: 51376 - protein, 10 aa, Artificial Sequence
  Description of Artificial Sequence: Synthetic epitope
TPNTIDQWDT

SEQ ID NO: 51377 - protein, 10 aa, Artificial Sequence
  Description of Artificial Sequence: Synthetic epitope
TPNVTELAQP

SEQ ID NO: 51378 - protein, 10 aa, Artificial Sequence
  Description of Artificial Sequence: Synthetic epitope
TPPTTQLPQQ

SEQ ID NO: 51379 - protein, 10 aa, Artificial Sequence
  Description of Artificial Sequence: Synthetic epitope
TPPVRTLKSQ

SEQ ID NO: 51380 - protein, 10 aa, Artificial Sequence
  Description of Artificial Sequence: Synthetic epitope
TPPVVARIAQ

SEQ ID NO: 51381 - protein, 10 aa, Artificial Sequence
  Description of Artificial Sequence: Synthetic epitope
TPQAAKQKNK

SEQ ID NO: 51382 - protein, 10 aa, Artificial Sequence
  Description of Artificial Sequence: Synthetic epitope
TPQADLSSTS

SEQ ID NO: 51383 - protein, 10 aa, Artificial Sequence
  Description of Artificial Sequence: Synthetic epitope
TPQADSEREA

SEQ ID NO: 51384 - protein, 10 aa, Artificial Sequence
  Description of Artificial Sequence: Synthetic epitope
TPQAISVVQR

SEQ ID NO: 51385 - protein, 10 aa, Artificial Sequence
  Description of Artificial Sequence: Synthetic epitope
TPQKAKLGDT

SEQ ID NO: 51386 - protein, 10 aa, Artificial Sequence
  Description of Artificial Sequence: Synthetic epitope
TPQKKAVFGQ

SEQ ID NO: 51387 - protein, 10 aa, Artificial Sequence
  Description of Artificial Sequence: Synthetic epitope
TPQQEETTYY

SEQ ID NO: 51388 - protein, 10 aa, Artificial Sequence
  Description of Artificial Sequence: Synthetic epitope
TPQQIQIPQV

SEQ ID NO: 51389 - protein, 10 aa, Artificial Sequence
  Description of Artificial Sequence: Synthetic epitope
TPQQTKITQD

SEQ ID NO: 51390 - protein, 10 aa, Artificial Sequence
  Description of Artificial Sequence: Synthetic epitope
TPQSQLTTPD

SEQ ID NO: 51391 - protein, 10 aa, Artificial Sequence
  Description of Artificial Sequence: Synthetic epitope
TPQSSTSSVQ

SEQ ID NO: 51392 - protein, 10 aa, Artificial Sequence
  Description of Artificial Sequence: Synthetic epitope
TPQVAAELEK

SEQ ID NO: 51393 - protein, 10 aa, Artificial Sequence
  Description of Artificial Sequence: Synthetic epitope
TPRGSTSGKQ

SEQ ID NO: 51394 - protein, 10 aa, Artificial Sequence
  Description of Artificial Sequence: Synthetic epitope
TPRIQNSPQK

SEQ ID NO: 51395 - protein, 10 aa, Artificial Sequence
  Description of Artificial Sequence: Synthetic epitope
TPRKSLSMYT

SEQ ID NO: 51396 - protein, 10 aa, Artificial Sequence
  Description of Artificial Sequence: Synthetic epitope
TPRSSFYGSD

SEQ ID NO: 51397 - protein, 10 aa, Artificial Sequence
  Description of Artificial Sequence: Synthetic epitope
TPRTTVKDSD

SEQ ID NO: 51398 - protein, 10 aa, Artificial Sequence
  Description of Artificial Sequence: Synthetic epitope
TPSAALASPA

SEQ ID NO: 51399 - protein, 10 aa, Artificial Sequence
  Description of Artificial Sequence: Synthetic epitope
TPSALITTNM

SEQ ID NO: 51400 - protein, 10 aa, Artificial Sequence
  Description of Artificial Sequence: Synthetic epitope
TPSAVSDELI

SEQ ID NO: 51401 - protein, 10 aa, Artificial Sequence
  Description of Artificial Sequence: Synthetic epitope
TPSESLATTD

SEQ ID NO: 51402 - protein, 10 aa, Artificial Sequence
  Description of Artificial Sequence: Synthetic epitope
TPSETDVDKK

SEQ ID NO: 51403 - protein, 10 aa, Artificial Sequence
  Description of Artificial Sequence: Synthetic epitope
TPSFQQAFAS

SEQ ID NO: 51404 - protein, 10 aa, Artificial Sequence
  Description of Artificial Sequence: Synthetic epitope
TPSIHLISGH

SEQ ID NO: 51405 - protein, 10 aa, Artificial Sequence
  Description of Artificial Sequence: Synthetic epitope
TPSKFLSKDK

SEQ ID NO: 51406 - protein, 10 aa, Artificial Sequence
  Description of Artificial Sequence: Synthetic epitope
TPSKSARDSV

SEQ ID NO: 51407 - protein, 10 aa, Artificial Sequence
  Description of Artificial Sequence: Synthetic epitope
TPSMTLTRAK

SEQ ID NO: 51408 - protein, 10 aa, Artificial Sequence
  Description of Artificial Sequence: Synthetic epitope
TPSQFRKLLF

SEQ ID NO: 51409 - protein, 10 aa, Artificial Sequence
  Description of Artificial Sequence: Synthetic epitope
TPSRARVGDT

SEQ ID NO: 51410 - protein, 10 aa, Artificial Sequence
  Description of Artificial Sequence: Synthetic epitope
TPSSEAKDSR

SEQ ID NO: 51411 - protein, 10 aa, Artificial Sequence
  Description of Artificial Sequence: Synthetic epitope
TPSSNTSLSP

SEQ ID NO: 51412 - protein, 10 aa, Artificial Sequence
  Description of Artificial Sequence: Synthetic epitope
TPSTQAQGLP

SEQ ID NO: 51413 - protein, 10 aa, Artificial Sequence
  Description of Artificial Sequence: Synthetic epitope
TPSVAKSPEA

SEQ ID NO: 51414 - protein, 10 aa, Artificial Sequence
  Description of Artificial Sequence: Synthetic epitope
TPTATQAGHA

SEQ ID NO: 51415 - protein, 10 aa, Artificial Sequence
  Description of Artificial Sequence: Synthetic epitope
TPTETNKAEQ

SEQ ID NO: 51416 - protein, 10 aa, Artificial Sequence
  Description of Artificial Sequence: Synthetic epitope
TPTRRTELYA

SEQ ID NO: 51417 - protein, 10 aa, Artificial Sequence
  Description of Artificial Sequence: Synthetic epitope
TPTSQLLAKQ

SEQ ID NO: 51418 - protein, 10 aa, Artificial Sequence
  Description of Artificial Sequence: Synthetic epitope
TPTSTSDNET

SEQ ID NO: 51419 - protein, 10 aa, Artificial Sequence
  Description of Artificial Sequence: Synthetic epitope
TPTVVSATSL

SEQ ID NO: 51420 - protein, 10 aa, Artificial Sequence
  Description of Artificial Sequence: Synthetic epitope
TPVESEANTS

SEQ ID NO: 51421 - protein, 10 aa, Artificial Sequence
  Description of Artificial Sequence: Synthetic epitope
TPVEVKESDE

SEQ ID NO: 51422 - protein, 10 aa, Artificial Sequence
  Description of Artificial Sequence: Synthetic epitope
TPVLAKAVDG

SEQ ID NO: 51423 - protein, 10 aa, Artificial Sequence
  Description of Artificial Sequence: Synthetic epitope
TPVQATNMND

SEQ ID NO: 51424 - protein, 10 aa, Artificial Sequence
  Description of Artificial Sequence: Synthetic epitope
TPVTTSTVLS

SEQ ID NO: 51425 - protein, 10 aa, Artificial Sequence
  Description of Artificial Sequence: Synthetic epitope
TPVTVKIPKA

SEQ ID NO: 51426 - protein, 10 aa, Artificial Sequence
  Description of Artificial Sequence: Synthetic epitope
TPVVASTTVV

SEQ ID NO: 51427 - protein, 10 aa, Artificial Sequence
  Description of Artificial Sequence: Synthetic epitope
TPYEATLQQG

SEQ ID NO: 51428 - protein, 10 aa, Artificial Sequence
  Description of Artificial Sequence: Synthetic epitope
TPYKDIFAAF

SEQ ID NO: 51429 - protein, 10 aa, Artificial Sequence
  Description of Artificial Sequence: Synthetic epitope
TPYTELLPIT

SEQ ID NO: 51430 - protein, 10 aa, Artificial Sequence
  Description of Artificial Sequence: Synthetic epitope
TPYYSVAQVG

SEQ ID NO: 51431 - protein, 10 aa, Artificial Sequence
  Description of Artificial Sequence: Synthetic epitope
TQAAPALDFS

SEQ ID NO: 51432 - protein, 10 aa, Artificial Sequence
  Description of Artificial Sequence: Synthetic epitope
TQADEGKTKK

SEQ ID NO: 51433 - protein, 10 aa, Artificial Sequence
  Description of Artificial Sequence: Synthetic epitope
TQAGIITEAK

SEQ ID NO: 51434 - protein, 10 aa, Artificial Sequence
  Description of Artificial Sequence: Synthetic epitope
TQAGNSSEQA

SEQ ID NO: 51435 - protein, 10 aa, Artificial Sequence
  Description of Artificial Sequence: Synthetic epitope
TQAGTIVEAR

SEQ ID NO: 51436 - protein, 10 aa, Artificial Sequence
  Description of Artificial Sequence: Synthetic epitope
TQAIHDVFSQ

SEQ ID NO: 51437 - protein, 10 aa, Artificial Sequence
  Description of Artificial Sequence: Synthetic epitope
TQAIVTKSDE

SEQ ID NO: 51438 - protein, 10 aa, Artificial Sequence
  Description of Artificial Sequence: Synthetic epitope
TQAKPVKNTF

SEQ ID NO: 51439 - protein, 10 aa, Artificial Sequence
  Description of Artificial Sequence: Synthetic epitope
TQALALSTNR

SEQ ID NO: 51440 - protein, 10 aa, Artificial Sequence
  Description of Artificial Sequence: Synthetic epitope
TQALITVQSR

SEQ ID NO: 51441 - protein, 10 aa, Artificial Sequence
  Description of Artificial Sequence: Synthetic epitope
TQALTNYGSG

SEQ ID NO: 51442 - protein, 10 aa, Artificial Sequence
  Description of Artificial Sequence: Synthetic epitope
TQAPTTALQA

SEQ ID NO: 51443 - protein, 10 aa, Artificial Sequence
  Description of Artificial Sequence: Synthetic epitope
TQAQPSNQSP

SEQ ID NO: 51444 - protein, 10 aa, Artificial Sequence
  Description of Artificial Sequence: Synthetic epitope
TQAQQTRQVT

SEQ ID NO: 51445 - protein, 10 aa, Artificial Sequence
  Description of Artificial Sequence: Synthetic epitope
TQAQSSDQGP

SEQ ID NO: 51446 - protein, 10 aa, Artificial Sequence
  Description of Artificial Sequence: Synthetic epitope
TQAQSSQNAA

SEQ ID NO: 51447 - protein, 10 aa, Artificial Sequence
  Description of Artificial Sequence: Synthetic epitope
TQARAASQKN

SEQ ID NO: 51448 - protein, 10 aa, Artificial Sequence
  Description of Artificial Sequence: Synthetic epitope
TQARMELQQL

SEQ ID NO: 51449 - protein, 10 aa, Artificial Sequence
  Description of Artificial Sequence: Synthetic epitope
TQASLRSHIG

SEQ ID NO: 51450 - protein, 10 aa, Artificial Sequence
  Description of Artificial Sequence: Synthetic epitope
TQASQKRAAM

SEQ ID NO: 51451 - protein, 10 aa, Artificial Sequence
  Description of Artificial Sequence: Synthetic epitope
TQASTPPQTQ

SEQ ID NO: 51452 - protein, 10 aa, Artificial Sequence
  Description of Artificial Sequence: Synthetic epitope
TQATQLPIIP

SEQ ID NO: 51453 - protein, 10 aa, Artificial Sequence
  Description of Artificial Sequence: Synthetic epitope
TQATSSASAD

SEQ ID NO: 51454 - protein, 10 aa, Artificial Sequence
  Description of Artificial Sequence: Synthetic epitope
TQAVEAKAQQ

SEQ ID NO: 51455 - protein, 10 aa, Artificial Sequence
  Description of Artificial Sequence: Synthetic epitope
TQDASGPELI

SEQ ID NO: 51456 - protein, 10 aa, Artificial Sequence
  Description of Artificial Sequence: Synthetic epitope
TQDDISAAKQ

SEQ ID NO: 51457 - protein, 10 aa, Artificial Sequence
  Description of Artificial Sequence: Synthetic epitope
TQDDREMAQA

SEQ ID NO: 51458 - protein, 10 aa, Artificial Sequence
  Description of Artificial Sequence: Synthetic epitope
TQDKEESVES

SEQ ID NO: 51459 - protein, 10 aa, Artificial Sequence
  Description of Artificial Sequence: Synthetic epitope
TQDKLFWDSQ

SEQ ID NO: 51460 - protein, 10 aa, Artificial Sequence
  Description of Artificial Sequence: Synthetic epitope
TQDKSVGQSP

SEQ ID NO: 51461 - protein, 10 aa, Artificial Sequence
  Description of Artificial Sequence: Synthetic epitope
TQDKTTMVTS

SEQ ID NO: 51462 - protein, 10 aa, Artificial Sequence
  Description of Artificial Sequence: Synthetic epitope
TQDLGEKTFE

SEQ ID NO: 51463 - protein, 10 aa, Artificial Sequence
  Description of Artificial Sequence: Synthetic epitope
TQDQEAEAQQ

SEQ ID NO: 51464 - protein, 10 aa, Artificial Sequence
  Description of Artificial Sequence: Synthetic epitope
TQDQTDQQEA

SEQ ID NO: 51465 - protein, 10 aa, Artificial Sequence
  Description of Artificial Sequence: Synthetic epitope
TQDSAMLGSK

SEQ ID NO: 51466 - protein, 10 aa, Artificial Sequence
  Description of Artificial Sequence: Synthetic epitope
TQDSKVAEDE

SEQ ID NO: 51467 - protein, 10 aa, Artificial Sequence
  Description of Artificial Sequence: Synthetic epitope
TQEAHKPTST

SEQ ID NO: 51468 - protein, 10 aa, Artificial Sequence
  Description of Artificial Sequence: Synthetic epitope
TQEEIKKEPE

SEQ ID NO: 51469 - protein, 10 aa, Artificial Sequence
  Description of Artificial Sequence: Synthetic epitope
TQEEITATVK

SEQ ID NO: 51470 - protein, 10 aa, Artificial Sequence
  Description of Artificial Sequence: Synthetic epitope
TQEKKAQLEE

SEQ ID NO: 51471 - protein, 10 aa, Artificial Sequence
  Description of Artificial Sequence: Synthetic epitope
TQEKSRMEAS

SEQ ID NO: 51472 - protein, 10 aa, Artificial Sequence
  Description of Artificial Sequence: Synthetic epitope
TQEKVNATGP

SEQ ID NO: 51473 - protein, 10 aa, Artificial Sequence
  Description of Artificial Sequence: Synthetic epitope
TQELAISRRQ

SEQ ID NO: 51474 - protein, 10 aa, Artificial Sequence
  Description of Artificial Sequence: Synthetic epitope
TQEMRNVSIG

SEQ ID NO: 51475 - protein, 10 aa, Artificial Sequence
  Description of Artificial Sequence: Synthetic epitope
TQEMTFGAQA

SEQ ID NO: 51476 - protein, 10 aa, Artificial Sequence
  Description of Artificial Sequence: Synthetic epitope
TQENATRARA

SEQ ID NO: 51477 - protein, 10 aa, Artificial Sequence
  Description of Artificial Sequence: Synthetic epitope
TQENVVKTLL

SEQ ID NO: 51478 - protein, 10 aa, Artificial Sequence
  Description of Artificial Sequence: Synthetic epitope
TQEQASEQQA

SEQ ID NO: 51479 - protein, 10 aa, Artificial Sequence
  Description of Artificial Sequence: Synthetic epitope
TQEQKTMLLD

SEQ ID NO: 51480 - protein, 10 aa, Artificial Sequence
  Description of Artificial Sequence: Synthetic epitope
TQESSEQDDT

SEQ ID NO: 51481 - protein, 10 aa, Artificial Sequence
  Description of Artificial Sequence: Synthetic epitope
TQETTDIKGL

SEQ ID NO: 51482 - protein, 10 aa, Artificial Sequence
  Description of Artificial Sequence: Synthetic epitope
TQEVTEKSER

SEQ ID NO: 51483 - protein, 10 aa, Artificial Sequence
  Description of Artificial Sequence: Synthetic epitope
TQFADSKKTP

SEQ ID NO: 51484 - protein, 10 aa, Artificial Sequence
  Description of Artificial Sequence: Synthetic epitope
TQFPHVEARA

SEQ ID NO: 51485 - protein, 10 aa, Artificial Sequence
  Description of Artificial Sequence: Synthetic epitope
TQFTAANELA

SEQ ID NO: 51486 - protein, 10 aa, Artificial Sequence
  Description of Artificial Sequence: Synthetic epitope
TQGGEHAILR

SEQ ID NO: 51487 - protein, 10 aa, Artificial Sequence
  Description of Artificial Sequence: Synthetic epitope
TQGKKTEVQK

SEQ ID NO: 51488 - protein, 10 aa, Artificial Sequence
  Description of Artificial Sequence: Synthetic epitope
TQGMKIKKES

SEQ ID NO: 51489 - protein, 10 aa, Artificial Sequence
  Description of Artificial Sequence: Synthetic epitope
TQGTKIASDG

SEQ ID NO: 51490 - protein, 10 aa, Artificial Sequence
  Description of Artificial Sequence: Synthetic epitope
TQGTKQSKLK

SEQ ID NO: 51491 - protein, 10 aa, Artificial Sequence
  Description of Artificial Sequence: Synthetic epitope
TQGVDMISKM

SEQ ID NO: 51492 - protein, 10 aa, Artificial Sequence
  Description of Artificial Sequence: Synthetic epitope
TQHADLTIID

SEQ ID NO: 51493 - protein, 10 aa, Artificial Sequence
  Description of Artificial Sequence: Synthetic epitope
TQHEESADEQ

SEQ ID NO: 51494 - protein, 10 aa, Artificial Sequence
  Description of Artificial Sequence: Synthetic epitope
TQHEQTFRWN

SEQ ID NO: 51495 - protein, 10 aa, Artificial Sequence
  Description of Artificial Sequence: Synthetic epitope
TQHETTRDPS

SEQ ID NO: 51496 - protein, 10 aa, Artificial Sequence
  Description of Artificial Sequence: Synthetic epitope
TQHMQSVKQA

SEQ ID NO: 51497 - protein, 10 aa, Artificial Sequence
  Description of Artificial Sequence: Synthetic epitope
TQHVVRALQT

SEQ ID NO: 51498 - protein, 10 aa, Artificial Sequence
  Description of Artificial Sequence: Synthetic epitope
TQIKRQEMDS

SEQ ID NO: 51499 - protein, 10 aa, Artificial Sequence
  Description of Artificial Sequence: Synthetic epitope
TQILGAMESQ

SEQ ID NO: 51500 - protein, 10 aa, Artificial Sequence
  Description of Artificial Sequence: Synthetic epitope
TQIVANAKGA

SEQ ID NO: 51501 - protein, 10 aa, Artificial Sequence
  Description of Artificial Sequence: Synthetic epitope
TQIYTYFVYK

SEQ ID NO: 51502 - protein, 10 aa, Artificial Sequence
  Description of Artificial Sequence: Synthetic epitope
TQKAANLSEK

SEQ ID NO: 51503 - protein, 10 aa, Artificial Sequence
  Description of Artificial Sequence: Synthetic epitope
TQKAKRKAQF

SEQ ID NO: 51504 - protein, 10 aa, Artificial Sequence
  Description of Artificial Sequence: Synthetic epitope
TQKARIVTLL

SEQ ID NO: 51505 - protein, 10 aa, Artificial Sequence
  Description of Artificial Sequence: Synthetic epitope
TQKEEHSSQA

SEQ ID NO: 51506 - protein, 10 aa, Artificial Sequence
  Description of Artificial Sequence: Synthetic epitope
TQKEIAKATS

SEQ ID NO: 51507 - protein, 10 aa, Artificial Sequence
  Description of Artificial Sequence: Synthetic epitope
TQKFINAEEL

SEQ ID NO: 51508 - protein, 10 aa, Artificial Sequence
  Description of Artificial Sequence: Synthetic epitope
TQKIASIQHQ

SEQ ID NO: 51509 - protein, 10 aa, Artificial Sequence
  Description of Artificial Sequence: Synthetic epitope
TQKIGVHAFQ

SEQ ID NO: 51510 - protein, 10 aa, Artificial Sequence
  Description of Artificial Sequence: Synthetic epitope
TQKKETTFFL

SEQ ID NO: 51511 - protein, 10 aa, Artificial Sequence
  Description of Artificial Sequence: Synthetic epitope
TQKKQLLDRD

SEQ ID NO: 51512 - protein, 10 aa, Artificial Sequence
  Description of Artificial Sequence: Synthetic epitope
TQKKVLTQER

SEQ ID NO: 51513 - protein, 10 aa, Artificial Sequence
  Description of Artificial Sequence: Synthetic epitope
TQKKVPDVKE

SEQ ID NO: 51514 - protein, 10 aa, Artificial Sequence
  Description of Artificial Sequence: Synthetic epitope
TQKMAKISHL

SEQ ID NO: 51515 - protein, 10 aa, Artificial Sequence
  Description of Artificial Sequence: Synthetic epitope
TQKMYELKTK

SEQ ID NO: 51516 - protein, 10 aa, Artificial Sequence
  Description of Artificial Sequence: Synthetic epitope
TQKTFDKQIV

SEQ ID NO: 51517 - protein, 10 aa, Artificial Sequence
  Description of Artificial Sequence: Synthetic epitope
TQKTFKVKDK

SEQ ID NO: 51518 - protein, 10 aa, Artificial Sequence
  Description of Artificial Sequence: Synthetic epitope
TQKTISLDYK

SEQ ID NO: 51519 - protein, 10 aa, Artificial Sequence
  Description of Artificial Sequence: Synthetic epitope
TQKTYEVNEV

SEQ ID NO: 51520 - protein, 10 aa, Artificial Sequence
  Description of Artificial Sequence: Synthetic epitope
TQKVEGSHDV

SEQ ID NO: 51521 - protein, 10 aa, Artificial Sequence
  Description of Artificial Sequence: Synthetic epitope
TQLAAQKMQV

SEQ ID NO: 51522 - protein, 10 aa, Artificial Sequence
  Description of Artificial Sequence: Synthetic epitope
TQLAKAQGHI

SEQ ID NO: 51523 - protein, 10 aa, Artificial Sequence
  Description of Artificial Sequence: Synthetic epitope
TQLAVQTKRV

SEQ ID NO: 51524 - protein, 10 aa, Artificial Sequence
  Description of Artificial Sequence: Synthetic epitope
TQLEAILEQK

SEQ ID NO: 51525 - protein, 10 aa, Artificial Sequence
  Description of Artificial Sequence: Synthetic epitope
TQLEGAQEQI

SEQ ID NO: 51526 - protein, 10 aa, Artificial Sequence
  Description of Artificial Sequence: Synthetic epitope
TQLEKKLMEV

SEQ ID NO: 51527 - protein, 10 aa, Artificial Sequence
  Description of Artificial Sequence: Synthetic epitope
TQLESKVLSY

SEQ ID NO: 51528 - protein, 10 aa, Artificial Sequence
  Description of Artificial Sequence: Synthetic epitope
TQLKQKKSTL

SEQ ID NO: 51529 - protein, 10 aa, Artificial Sequence
  Description of Artificial Sequence: Synthetic epitope
TQLLAQRLSR

SEQ ID NO: 51530 - protein, 10 aa, Artificial Sequence
  Description of Artificial Sequence: Synthetic epitope
TQLLRVLAIE

SEQ ID NO: 51531 - protein, 10 aa, Artificial Sequence
  Description of Artificial Sequence: Synthetic epitope
TQLMDMASES

SEQ ID NO: 51532 - protein, 10 aa, Artificial Sequence
  Description of Artificial Sequence: Synthetic epitope
TQLQTTLASV

SEQ ID NO: 51533 - protein, 10 aa, Artificial Sequence
  Description of Artificial Sequence: Synthetic epitope
TQLQVAQSEE

SEQ ID NO: 51534 - protein, 10 aa, Artificial Sequence
  Description of Artificial Sequence: Synthetic epitope
TQLSFELSEF

SEQ ID NO: 51535 - protein, 10 aa, Artificial Sequence
  Description of Artificial Sequence: Synthetic epitope
TQLTDNLTVL

SEQ ID NO: 51536 - protein, 10 aa, Artificial Sequence
  Description of Artificial Sequence: Synthetic epitope
TQLTTVQGVV

SEQ ID NO: 51537 - protein, 10 aa, Artificial Sequence
  Description of Artificial Sequence: Synthetic epitope
TQLVGQHGRT

SEQ ID NO: 51538 - protein, 10 aa, Artificial Sequence
  Description of Artificial Sequence: Synthetic epitope
TQLYKSLQQK

SEQ ID NO: 51539 - protein, 10 aa, Artificial Sequence
  Description of Artificial Sequence: Synthetic epitope
TQMAGTSSNT

SEQ ID NO: 51540 - protein, 10 aa, Artificial Sequence
  Description of Artificial Sequence: Synthetic epitope
TQMKSTFEKK

SEQ ID NO: 51541 - protein, 10 aa, Artificial Sequence
  Description of Artificial Sequence: Synthetic epitope
TQMLTHRSSD

SEQ ID NO: 51542 - protein, 10 aa, Artificial Sequence
  Description of Artificial Sequence: Synthetic epitope
TQMQQMHGRM

SEQ ID NO: 51543 - protein, 10 aa, Artificial Sequence
  Description of Artificial Sequence: Synthetic epitope
TQMVNVYHVH

SEQ ID NO: 51544 - protein, 10 aa, Artificial Sequence
  Description of Artificial Sequence: Synthetic epitope
TQMVSDLSQV

SEQ ID NO: 51545 - protein, 10 aa, Artificial Sequence
  Description of Artificial Sequence: Synthetic epitope
TQNEAKVKQQ

SEQ ID NO: 51546 - protein, 10 aa, Artificial Sequence
  Description of Artificial Sequence: Synthetic epitope
TQNEDRSVSS

SEQ ID NO: 51547 - protein, 10 aa, Artificial Sequence
  Description of Artificial Sequence: Synthetic epitope
TQNQKQYDTS

SEQ ID NO: 51548 - protein, 10 aa, Artificial Sequence
  Description of Artificial Sequence: Synthetic epitope
TQNQRSESNR

SEQ ID NO: 51549 - protein, 10 aa, Artificial Sequence
  Description of Artificial Sequence: Synthetic epitope
TQNQSSASEK

SEQ ID NO: 51550 - protein, 10 aa, Artificial Sequence
  Description of Artificial Sequence: Synthetic epitope
TQNSAEEKED

SEQ ID NO: 51551 - protein, 10 aa, Artificial Sequence
  Description of Artificial Sequence: Synthetic epitope
TQNSLLSLES

SEQ ID NO: 51552 - protein, 10 aa, Artificial Sequence
  Description of Artificial Sequence: Synthetic epitope
TQNSSAEKVQ

SEQ ID NO: 51553 - protein, 10 aa, Artificial Sequence
  Description of Artificial Sequence: Synthetic epitope
TQNTPTADGH

SEQ ID NO: 51554 - protein, 10 aa, Artificial Sequence
  Description of Artificial Sequence: Synthetic epitope
TQNTPTVKKS

SEQ ID NO: 51555 - protein, 10 aa, Artificial Sequence
  Description of Artificial Sequence: Synthetic epitope
TQNVVINMDD

SEQ ID NO: 51556 - protein, 10 aa, Artificial Sequence
  Description of Artificial Sequence: Synthetic epitope
TQPQLENDSY

SEQ ID NO: 51557 - protein, 10 aa, Artificial Sequence
  Description of Artificial Sequence: Synthetic epitope
TQPQPQSLLQ

SEQ ID NO: 51558 - protein, 10 aa, Artificial Sequence
  Description of Artificial Sequence: Synthetic epitope
TQPSLSAAPF

SEQ ID NO: 51559 - protein, 10 aa, Artificial Sequence
  Description of Artificial Sequence: Synthetic epitope
TQPSVLQTQQ

SEQ ID NO: 51560 - protein, 10 aa, Artificial Sequence
  Description of Artificial Sequence: Synthetic epitope
TQPVLQSQVE

SEQ ID NO: 51561 - protein, 10 aa, Artificial Sequence
  Description of Artificial Sequence: Synthetic epitope
TQPVPTEAQT

SEQ ID NO: 51562 - protein, 10 aa, Artificial Sequence
  Description of Artificial Sequence: Synthetic epitope
TQQDLAPQQR

SEQ ID NO: 51563 - protein, 10 aa, Artificial Sequence
  Description of Artificial Sequence: Synthetic epitope
TQQEALTTAH

SEQ ID NO: 51564 - protein, 10 aa, Artificial Sequence
  Description of Artificial Sequence: Synthetic epitope
TQQFQAVHPA

SEQ ID NO: 51565 - protein, 10 aa, Artificial Sequence
  Description of Artificial Sequence: Synthetic epitope
TQQGATAVAG

SEQ ID NO: 51566 - protein, 10 aa, Artificial Sequence
  Description of Artificial Sequence: Synthetic epitope
TQQGEHTRVA

SEQ ID NO: 51567 - protein, 10 aa, Artificial Sequence
  Description of Artificial Sequence: Synthetic epitope
TQQIQDEDDQ

SEQ ID NO: 51568 - protein, 10 aa, Artificial Sequence
  Description of Artificial Sequence: Synthetic epitope
TQQLAAMQFL

SEQ ID NO: 51569 - protein, 10 aa, Artificial Sequence
  Description of Artificial Sequence: Synthetic epitope
TQQNRKLTDF

SEQ ID NO: 51570 - protein, 10 aa, Artificial Sequence
  Description of Artificial Sequence: Synthetic epitope
TQQRLLVSNA

SEQ ID NO: 51571 - protein, 10 aa, Artificial Sequence
  Description of Artificial Sequence: Synthetic epitope
TQQTIKTESS

SEQ ID NO: 51572 - protein, 10 aa, Artificial Sequence
  Description of Artificial Sequence: Synthetic epitope
TQQTKLTVGS

SEQ ID NO: 51573 - protein, 10 aa, Artificial Sequence
  Description of Artificial Sequence: Synthetic epitope
TQQVQVIEML

SEQ ID NO: 51574 - protein, 10 aa, Artificial Sequence
  Description of Artificial Sequence: Synthetic epitope
TQRADTQPSR

SEQ ID NO: 51575 - protein, 10 aa, Artificial Sequence
  Description of Artificial Sequence: Synthetic epitope
TQRALSLLEE

SEQ ID NO: 51576 - protein, 10 aa, Artificial Sequence
  Description of Artificial Sequence: Synthetic epitope
TQREHSSEHV

SEQ ID NO: 51577 - protein, 10 aa, Artificial Sequence
  Description of Artificial Sequence: Synthetic epitope
TQREPKEMQK

SEQ ID NO: 51578 - protein, 10 aa, Artificial Sequence
  Description of Artificial Sequence: Synthetic epitope
TQRGDETPRE

SEQ ID NO: 51579 - protein, 10 aa, Artificial Sequence
  Description of Artificial Sequence: Synthetic epitope
TQRGLFAAET

SEQ ID NO: 51580 - protein, 10 aa, Artificial Sequence
  Description of Artificial Sequence: Synthetic epitope
TQRILLQMHV

SEQ ID NO: 51581 - protein, 10 aa, Artificial Sequence
  Description of Artificial Sequence: Synthetic epitope
TQRKKMRLAN

SEQ ID NO: 51582 - protein, 10 aa, Artificial Sequence
  Description of Artificial Sequence: Synthetic epitope
TQRKVVSAQS

SEQ ID NO: 51583 - protein, 10 aa, Artificial Sequence
  Description of Artificial Sequence: Synthetic epitope
TQRLDSATVR

SEQ ID NO: 51584 - protein, 10 aa, Artificial Sequence
  Description of Artificial Sequence: Synthetic epitope
TQRLWSNRFG

SEQ ID NO: 51585 - protein, 10 aa, Artificial Sequence
  Description of Artificial Sequence: Synthetic epitope
TQRNVSQVQD

SEQ ID NO: 51586 - protein, 10 aa, Artificial Sequence
  Description of Artificial Sequence: Synthetic epitope
TQRQLSQAGS

SEQ ID NO: 51587 - protein, 10 aa, Artificial Sequence
  Description of Artificial Sequence: Synthetic epitope
TQRRVLFETD

SEQ ID NO: 51588 - protein, 10 aa, Artificial Sequence
  Description of Artificial Sequence: Synthetic epitope
TQRSAGVDQN

SEQ ID NO: 51589 - protein, 10 aa, Artificial Sequence
  Description of Artificial Sequence: Synthetic epitope
TQRSQTQTIL

SEQ ID NO: 51590 - protein, 10 aa, Artificial Sequence
  Description of Artificial Sequence: Synthetic epitope
TQRVNLIESD

SEQ ID NO: 51591 - protein, 10 aa, Artificial Sequence
  Description of Artificial Sequence: Synthetic epitope
TQSDAQDNAD

SEQ ID NO: 51592 - protein, 10 aa, Artificial Sequence
  Description of Artificial Sequence: Synthetic epitope
TQSEEATQGE

SEQ ID NO: 51593 - protein, 10 aa, Artificial Sequence
  Description of Artificial Sequence: Synthetic epitope
TQSEIAQKQK

SEQ ID NO: 51594 - protein, 10 aa, Artificial Sequence
  Description of Artificial Sequence: Synthetic epitope
TQSEIGQKQK

SEQ ID NO: 51595 - protein, 10 aa, Artificial Sequence
  Description of Artificial Sequence: Synthetic epitope
TQSEITDLSS

SEQ ID NO: 51596 - protein, 10 aa, Artificial Sequence
  Description of Artificial Sequence: Synthetic epitope
TQSEKLTNTA

SEQ ID NO: 51597 - protein, 10 aa, Artificial Sequence
  Description of Artificial Sequence: Synthetic epitope
TQSESKVVAG

SEQ ID NO: 51598 - protein, 10 aa, Artificial Sequence
  Description of Artificial Sequence: Synthetic epitope
TQSETIQTAA

SEQ ID NO: 51599 - protein, 10 aa, Artificial Sequence
  Description of Artificial Sequence: Synthetic epitope
TQSETTSDQS

SEQ ID NO: 51600 - protein, 10 aa, Artificial Sequence
  Description of Artificial Sequence: Synthetic epitope
TQSGKTVIRL

SEQ ID NO: 51601 - protein, 10 aa, Artificial Sequence
  Description of Artificial Sequence: Synthetic epitope
TQSKIERVKV

SEQ ID NO: 51602 - protein, 10 aa, Artificial Sequence
  Description of Artificial Sequence: Synthetic epitope
TQSKLDIKVL

SEQ ID NO: 51603 - protein, 10 aa, Artificial Sequence
  Description of Artificial Sequence: Synthetic epitope
TQSLQLLDTT

SEQ ID NO: 51604 - protein, 10 aa, Artificial Sequence
  Description of Artificial Sequence: Synthetic epitope
TQSLSLQREQ

SEQ ID NO: 51605 - protein, 10 aa, Artificial Sequence
  Description of Artificial Sequence: Synthetic epitope
TQSMKLDGEL

SEQ ID NO: 51606 - protein, 10 aa, Artificial Sequence
  Description of Artificial Sequence: Synthetic epitope
TQSNTSLGSS

SEQ ID NO: 51607 - protein, 10 aa, Artificial Sequence
  Description of Artificial Sequence: Synthetic epitope
TQSQSLSRSQ

SEQ ID NO: 51608 - protein, 10 aa, Artificial Sequence
  Description of Artificial Sequence: Synthetic epitope
TQSQTKHILA

SEQ ID NO: 51609 - protein, 10 aa, Artificial Sequence
  Description of Artificial Sequence: Synthetic epitope
TQSRTTATGE

SEQ ID NO: 51610 - protein, 10 aa, Artificial Sequence
  Description of Artificial Sequence: Synthetic epitope
TQSSESVTLD

SEQ ID NO: 51611 - protein, 10 aa, Artificial Sequence
  Description of Artificial Sequence: Synthetic epitope
TQSSETASED

SEQ ID NO: 51612 - protein, 10 aa, Artificial Sequence
  Description of Artificial Sequence: Synthetic epitope
TQSSIQEPSF

SEQ ID NO: 51613 - protein, 10 aa, Artificial Sequence
  Description of Artificial Sequence: Synthetic epitope
TQSSKSRPDG

SEQ ID NO: 51614 - protein, 10 aa, Artificial Sequence
  Description of Artificial Sequence: Synthetic epitope
TQSSPKSKQE

SEQ ID NO: 51615 - protein, 10 aa, Artificial Sequence
  Description of Artificial Sequence: Synthetic epitope
TQSTLTAPLY

SEQ ID NO: 51616 - protein, 10 aa, Artificial Sequence
  Description of Artificial Sequence: Synthetic epitope
TQSTPTVQAA

SEQ ID NO: 51617 - protein, 10 aa, Artificial Sequence
  Description of Artificial Sequence: Synthetic epitope
TQSTQSFNDF

SEQ ID NO: 51618 - protein, 10 aa, Artificial Sequence
  Description of Artificial Sequence: Synthetic epitope
TQSTTEKIHN

SEQ ID NO: 51619 - protein, 10 aa, Artificial Sequence
  Description of Artificial Sequence: Synthetic epitope
TQSVKNNTQV

SEQ ID NO: 51620 - protein, 10 aa, Artificial Sequence
  Description of Artificial Sequence: Synthetic epitope
TQSYRAKLTP

SEQ ID NO: 51621 - protein, 10 aa, Artificial Sequence
  Description of Artificial Sequence: Synthetic epitope
TQTDPADSRN

SEQ ID NO: 51622 - protein, 10 aa, Artificial Sequence
  Description of Artificial Sequence: Synthetic epitope
TQTDRKIETE

SEQ ID NO: 51623 - protein, 10 aa, Artificial Sequence
  Description of Artificial Sequence: Synthetic epitope
TQTELSFKSE

SEQ ID NO: 51624 - protein, 10 aa, Artificial Sequence
  Description of Artificial Sequence: Synthetic epitope
TQTESFSSTG

SEQ ID NO: 51625 - protein, 10 aa, Artificial Sequence
  Description of Artificial Sequence: Synthetic epitope
TQTESGSEEV

SEQ ID NO: 51626 - protein, 10 aa, Artificial Sequence
  Description of Artificial Sequence: Synthetic epitope
TQTIRRGTAD

SEQ ID NO: 51627 - protein, 10 aa, Artificial Sequence
  Description of Artificial Sequence: Synthetic epitope
TQTKILRAQS

SEQ ID NO: 51628 - protein, 10 aa, Artificial Sequence
  Description of Artificial Sequence: Synthetic epitope
TQTKMSQIDI

SEQ ID NO: 51629 - protein, 10 aa, Artificial Sequence
  Description of Artificial Sequence: Synthetic epitope
TQTLAQLSHI

SEQ ID NO: 51630 - protein, 10 aa, Artificial Sequence
  Description of Artificial Sequence: Synthetic epitope
TQTLFQANLF

SEQ ID NO: 51631 - protein, 10 aa, Artificial Sequence
  Description of Artificial Sequence: Synthetic epitope
TQTLQANESA

SEQ ID NO: 51632 - protein, 10 aa, Artificial Sequence
  Description of Artificial Sequence: Synthetic epitope
TQTLSQILAG

SEQ ID NO: 51633 - protein, 10 aa, Artificial Sequence
  Description of Artificial Sequence: Synthetic epitope
TQTMATKAPE

SEQ ID NO: 51634 - protein, 10 aa, Artificial Sequence
  Description of Artificial Sequence: Synthetic epitope
TQTPTNINVS

SEQ ID NO: 51635 - protein, 10 aa, Artificial Sequence
  Description of Artificial Sequence: Synthetic epitope
TQTQSLQQSV

SEQ ID NO: 51636 - protein, 10 aa, Artificial Sequence
  Description of Artificial Sequence: Synthetic epitope
TQTRAKQAAT

SEQ ID NO: 51637 - protein, 10 aa, Artificial Sequence
  Description of Artificial Sequence: Synthetic epitope
TQTRRYPSSI

SEQ ID NO: 51638 - protein, 10 aa, Artificial Sequence
  Description of Artificial Sequence: Synthetic epitope
TQTSNAAKNF

SEQ ID NO: 51639 - protein, 10 aa, Artificial Sequence
  Description of Artificial Sequence: Synthetic epitope
TQTSQVEIKL

SEQ ID NO: 51640 - protein, 10 aa, Artificial Sequence
  Description of Artificial Sequence: Synthetic epitope
TQTSQVLTAV

SEQ ID NO: 51641 - protein, 10 aa, Artificial Sequence
  Description of Artificial Sequence: Synthetic epitope
TQTSSLNMLK

SEQ ID NO: 51642 - protein, 10 aa, Artificial Sequence
  Description of Artificial Sequence: Synthetic epitope
TQTSSVGPFS

SEQ ID NO: 51643 - protein, 10 aa, Artificial Sequence
  Description of Artificial Sequence: Synthetic epitope
TQTVSDKSTQ

SEQ ID NO: 51644 - protein, 10 aa, Artificial Sequence
  Description of Artificial Sequence: Synthetic epitope
TQVDVRSRVA

SEQ ID NO: 51645 - protein, 10 aa, Artificial Sequence
  Description of Artificial Sequence: Synthetic epitope
TQVEQLLYAK

SEQ ID NO: 51646 - protein, 10 aa, Artificial Sequence
  Description of Artificial Sequence: Synthetic epitope
TQVIENWTNQ

SEQ ID NO: 51647 - protein, 10 aa, Artificial Sequence
  Description of Artificial Sequence: Synthetic epitope
TQVIKQENES

SEQ ID NO: 51648 - protein, 10 aa, Artificial Sequence
  Description of Artificial Sequence: Synthetic epitope
TQVLAEERTE

SEQ ID NO: 51649 - protein, 10 aa, Artificial Sequence
  Description of Artificial Sequence: Synthetic epitope
TQVLNKSLAE

SEQ ID NO: 51650 - protein, 10 aa, Artificial Sequence
  Description of Artificial Sequence: Synthetic epitope
TQVLTNQQNY

SEQ ID NO: 51651 - protein, 10 aa, Artificial Sequence
  Description of Artificial Sequence: Synthetic epitope
TQVNEATKAR

SEQ ID NO: 51652 - protein, 10 aa, Artificial Sequence
  Description of Artificial Sequence: Synthetic epitope
TQVQEKATSL

SEQ ID NO: 51653 - protein, 10 aa, Artificial Sequence
  Description of Artificial Sequence: Synthetic epitope
TQVQTTMREN

SEQ ID NO: 51654 - protein, 10 aa, Artificial Sequence
  Description of Artificial Sequence: Synthetic epitope
TQVSEVTAQP

SEQ ID NO: 51655 - protein, 10 aa, Artificial Sequence
  Description of Artificial Sequence: Synthetic epitope
TQVTGRIFVQ

SEQ ID NO: 51656 - protein, 10 aa, Artificial Sequence
  Description of Artificial Sequence: Synthetic epitope
TQVVKKAETE

SEQ ID NO: 51657 - protein, 10 aa, Artificial Sequence
  Description of Artificial Sequence: Synthetic epitope
TQVVQQVPVQ

SEQ ID NO: 51658 - protein, 10 aa, Artificial Sequence
  Description of Artificial Sequence: Synthetic epitope
TQVYLGPSKK

SEQ ID NO: 51659 - protein, 10 aa, Artificial Sequence
  Description of Artificial Sequence: Synthetic epitope
TQWGQKSDSS

SEQ ID NO: 51660 - protein, 10 aa, Artificial Sequence
  Description of Artificial Sequence: Synthetic epitope
TQWIRTISQQ

SEQ ID NO: 51661 - protein, 10 aa, Artificial Sequence
  Description of Artificial Sequence: Synthetic epitope
TQWKLVIQTQ

SEQ ID NO: 51662 - protein, 10 aa, Artificial Sequence
  Description of Artificial Sequence: Synthetic epitope
TQYEDESFTK

SEQ ID NO: 51663 - protein, 10 aa, Artificial Sequence
  Description of Artificial Sequence: Synthetic epitope
TQYGAHEQTH

SEQ ID NO: 51664 - protein, 10 aa, Artificial Sequence
  Description of Artificial Sequence: Synthetic epitope
TQYLNQHQTA

SEQ ID NO: 51665 - protein, 10 aa, Artificial Sequence
  Description of Artificial Sequence: Synthetic epitope
TQYQSKASDH

SEQ ID NO: 51666 - protein, 10 aa, Artificial Sequence
  Description of Artificial Sequence: Synthetic epitope
TQYSTRVVTR

SEQ ID NO: 51667 - protein, 10 aa, Artificial Sequence
  Description of Artificial Sequence: Synthetic epitope
TRAAKRARHK

SEQ ID NO: 51668 - protein, 10 aa, Artificial Sequence
  Description of Artificial Sequence: Synthetic epitope
TRAATIIEER

SEQ ID NO: 51669 - protein, 10 aa, Artificial Sequence
  Description of Artificial Sequence: Synthetic epitope
TRAENRIKQL

SEQ ID NO: 51670 - protein, 10 aa, Artificial Sequence
  Description of Artificial Sequence: Synthetic epitope
TRAESEASSR

SEQ ID NO: 51671 - protein, 10 aa, Artificial Sequence
  Description of Artificial Sequence: Synthetic epitope
TRAGISTTSV

SEQ ID NO: 51672 - protein, 10 aa, Artificial Sequence
  Description of Artificial Sequence: Synthetic epitope
TRAKASAEKL

SEQ ID NO: 51673 - protein, 10 aa, Artificial Sequence
  Description of Artificial Sequence: Synthetic epitope
TRALEDPEGE

SEQ ID NO: 51674 - protein, 10 aa, Artificial Sequence
  Description of Artificial Sequence: Synthetic epitope
TRALTSSRGV

SEQ ID NO: 51675 - protein, 10 aa, Artificial Sequence
  Description of Artificial Sequence: Synthetic epitope
TRANLASKKD

SEQ ID NO: 51676 - protein, 10 aa, Artificial Sequence
  Description of Artificial Sequence: Synthetic epitope
TRARNRLTTP

SEQ ID NO: 51677 - protein, 10 aa, Artificial Sequence
  Description of Artificial Sequence: Synthetic epitope
TRARQIDRSH

SEQ ID NO: 51678 - protein, 10 aa, Artificial Sequence
  Description of Artificial Sequence: Synthetic epitope
TRASKPSDMS

SEQ ID NO: 51679 - protein, 10 aa, Artificial Sequence
  Description of Artificial Sequence: Synthetic epitope
TRASNVEINE

SEQ ID NO: 51680 - protein, 10 aa, Artificial Sequence
  Description of Artificial Sequence: Synthetic epitope
TRASVTVGGE

SEQ ID NO: 51681 - protein, 10 aa, Artificial Sequence
  Description of Artificial Sequence: Synthetic epitope
TRATSREEKN

SEQ ID NO: 51682 - protein, 10 aa, Artificial Sequence
  Description of Artificial Sequence: Synthetic epitope
TRATSSTSTP

SEQ ID NO: 51683 - protein, 10 aa, Artificial Sequence
  Description of Artificial Sequence: Synthetic epitope
TRAVKKLNAN

SEQ ID NO: 51684 - protein, 10 aa, Artificial Sequence
  Description of Artificial Sequence: Synthetic epitope
TRAVTNASQA

SEQ ID NO: 51685 - protein, 10 aa, Artificial Sequence
  Description of Artificial Sequence: Synthetic epitope
TRAYSLKMHR

SEQ ID NO: 51686 - protein, 10 aa, Artificial Sequence
  Description of Artificial Sequence: Synthetic epitope
TRDDILRDWN

SEQ ID NO: 51687 - protein, 10 aa, Artificial Sequence
  Description of Artificial Sequence: Synthetic epitope
TRDLRASPKP

SEQ ID NO: 51688 - protein, 10 aa, Artificial Sequence
  Description of Artificial Sequence: Synthetic epitope
TRDQEDTART

SEQ ID NO: 51689 - protein, 10 aa, Artificial Sequence
  Description of Artificial Sequence: Synthetic epitope
TRDRAKIQHS

SEQ ID NO: 51690 - protein, 10 aa, Artificial Sequence
  Description of Artificial Sequence: Synthetic epitope
TRDSSIFKYN

SEQ ID NO: 51691 - protein, 10 aa, Artificial Sequence
  Description of Artificial Sequence: Synthetic epitope
TRDSSRTSIR

SEQ ID NO: 51692 - protein, 10 aa, Artificial Sequence
  Description of Artificial Sequence: Synthetic epitope
TREDNEVSEA

SEQ ID NO: 51693 - protein, 10 aa, Artificial Sequence
  Description of Artificial Sequence: Synthetic epitope
TREEASTSLP

SEQ ID NO: 51694 - protein, 10 aa, Artificial Sequence
  Description of Artificial Sequence: Synthetic epitope
TREEPTKQIM

SEQ ID NO: 51695 - protein, 10 aa, Artificial Sequence
  Description of Artificial Sequence: Synthetic epitope
TREKFSDASY

SEQ ID NO: 51696 - protein, 10 aa, Artificial Sequence
  Description of Artificial Sequence: Synthetic epitope
TREKQEAAKV

SEQ ID NO: 51697 - protein, 10 aa, Artificial Sequence
  Description of Artificial Sequence: Synthetic epitope
TREMGRISQV

SEQ ID NO: 51698 - protein, 10 aa, Artificial Sequence
  Description of Artificial Sequence: Synthetic epitope
TREQMFAAQE

SEQ ID NO: 51699 - protein, 10 aa, Artificial Sequence
  Description of Artificial Sequence: Synthetic epitope
TRERKQLREE

SEQ ID NO: 51700 - protein, 10 aa, Artificial Sequence
  Description of Artificial Sequence: Synthetic epitope
TRESVTDDPQ

SEQ ID NO: 51701 - protein, 10 aa, Artificial Sequence
  Description of Artificial Sequence: Synthetic epitope
TRFIEARASG

SEQ ID NO: 51702 - protein, 10 aa, Artificial Sequence
  Description of Artificial Sequence: Synthetic epitope
TRFILKDDMR

SEQ ID NO: 51703 - protein, 10 aa, Artificial Sequence
  Description of Artificial Sequence: Synthetic epitope
TRFMETADST

SEQ ID NO: 51704 - protein, 10 aa, Artificial Sequence
  Description of Artificial Sequence: Synthetic epitope
TRFTFRTARQ

SEQ ID NO: 51705 - protein, 10 aa, Artificial Sequence
  Description of Artificial Sequence: Synthetic epitope
TRFYDQLNHH

SEQ ID NO: 51706 - protein, 10 aa, Artificial Sequence
  Description of Artificial Sequence: Synthetic epitope
TRGDLSSIRW

SEQ ID NO: 51707 - protein, 10 aa, Artificial Sequence
  Description of Artificial Sequence: Synthetic epitope
TRGEMVKNRT

SEQ ID NO: 51708 - protein, 10 aa, Artificial Sequence
  Description of Artificial Sequence: Synthetic epitope
TRGIITEING

SEQ ID NO: 51709 - protein, 10 aa, Artificial Sequence
  Description of Artificial Sequence: Synthetic epitope
TRGKKQIFEE

SEQ ID NO: 51710 - protein, 10 aa, Artificial Sequence
  Description of Artificial Sequence: Synthetic epitope
TRHEHEAWPE

SEQ ID NO: 51711 - protein, 10 aa, Artificial Sequence
  Description of Artificial Sequence: Synthetic epitope
TRHTTDHPMQ

SEQ ID NO: 51712 - protein, 10 aa, Artificial Sequence
  Description of Artificial Sequence: Synthetic epitope
TRIDMIFTPG

SEQ ID NO: 51713 - protein, 10 aa, Artificial Sequence
  Description of Artificial Sequence: Synthetic epitope
TRIENATQAQ

SEQ ID NO: 51714 - protein, 10 aa, Artificial Sequence
  Description of Artificial Sequence: Synthetic epitope
TRILSDTTLW

SEQ ID NO: 51715 - protein, 10 aa, Artificial Sequence
  Description of Artificial Sequence: Synthetic epitope
TRILSDTTLW

SEQ ID NO: 51716 - protein, 10 aa, Artificial Sequence
  Description of Artificial Sequence: Synthetic epitope
TRISAVLLEG

SEQ ID NO: 51717 - protein, 10 aa, Artificial Sequence
  Description of Artificial Sequence: Synthetic epitope
TRISSAGNTQ

SEQ ID NO: 51718 - protein, 10 aa, Artificial Sequence
  Description of Artificial Sequence: Synthetic epitope
TRISSRQHQA

SEQ ID NO: 51719 - protein, 10 aa, Artificial Sequence
  Description of Artificial Sequence: Synthetic epitope
TRITMKRMAQ

SEQ ID NO: 51720 - protein, 10 aa, Artificial Sequence
  Description of Artificial Sequence: Synthetic epitope
TRIYESKYWK

SEQ ID NO: 51721 - protein, 10 aa, Artificial Sequence
  Description of Artificial Sequence: Synthetic epitope
TRKALVRLQK

SEQ ID NO: 51722 - protein, 10 aa, Artificial Sequence
  Description of Artificial Sequence: Synthetic epitope
TRKEAVQWEP

SEQ ID NO: 51723 - protein, 10 aa, Artificial Sequence
  Description of Artificial Sequence: Synthetic epitope
TRKEEKQRNG

SEQ ID NO: 51724 - protein, 10 aa, Artificial Sequence
  Description of Artificial Sequence: Synthetic epitope
TRKISRKDGR

SEQ ID NO: 51725 - protein, 10 aa, Artificial Sequence
  Description of Artificial Sequence: Synthetic epitope
TRKKPVVKKQ

SEQ ID NO: 51726 - protein, 10 aa, Artificial Sequence
  Description of Artificial Sequence: Synthetic epitope
TRKKSNRTKS

SEQ ID NO: 51727 - protein, 10 aa, Artificial Sequence
  Description of Artificial Sequence: Synthetic epitope
TRKLKVKRSS

SEQ ID NO: 51728 - protein, 10 aa, Artificial Sequence
  Description of Artificial Sequence: Synthetic epitope
TRKPDSMVTN

SEQ ID NO: 51729 - protein, 10 aa, Artificial Sequence
  Description of Artificial Sequence: Synthetic epitope
TRKQLQDQEI

SEQ ID NO: 51730 - protein, 10 aa, Artificial Sequence
  Description of Artificial Sequence: Synthetic epitope
TRKRDTRSES

SEQ ID NO: 51731 - protein, 10 aa, Artificial Sequence
  Description of Artificial Sequence: Synthetic epitope
TRKRRSASSG

SEQ ID NO: 51732 - protein, 10 aa, Artificial Sequence
  Description of Artificial Sequence: Synthetic epitope
TRKRSKKERG

SEQ ID NO: 51733 - protein, 10 aa, Artificial Sequence
  Description of Artificial Sequence: Synthetic epitope
TRKSESSNTT

SEQ ID NO: 51734 - protein, 10 aa, Artificial Sequence
  Description of Artificial Sequence: Synthetic epitope
TRKSFMSLTT

SEQ ID NO: 51735 - protein, 10 aa, Artificial Sequence
  Description of Artificial Sequence: Synthetic epitope
TRKTRIIDVV

SEQ ID NO: 51736 - protein, 10 aa, Artificial Sequence
  Description of Artificial Sequence: Synthetic epitope
TRKVSLAPQA

SEQ ID NO: 51737 - protein, 10 aa, Artificial Sequence
  Description of Artificial Sequence: Synthetic epitope
TRLAERTSNL

SEQ ID NO: 51738 - protein, 10 aa, Artificial Sequence
  Description of Artificial Sequence: Synthetic epitope
TRLAKEVAKQ

SEQ ID NO: 51739 - protein, 10 aa, Artificial Sequence
  Description of Artificial Sequence: Synthetic epitope
TRLARNLLQD

SEQ ID NO: 51740 - protein, 10 aa, Artificial Sequence
  Description of Artificial Sequence: Synthetic epitope
TRLATQLTEE

SEQ ID NO: 51741 - protein, 10 aa, Artificial Sequence
  Description of Artificial Sequence: Synthetic epitope
TRLEKIVDKS

SEQ ID NO: 51742 - protein, 10 aa, Artificial Sequence
  Description of Artificial Sequence: Synthetic epitope
TRLEQSLSEA

SEQ ID NO: 51743 - protein, 10 aa, Artificial Sequence
  Description of Artificial Sequence: Synthetic epitope
TRLGSTKSLT

SEQ ID NO: 51744 - protein, 10 aa, Artificial Sequence
  Description of Artificial Sequence: Synthetic epitope
TRLIETTPAP

SEQ ID NO: 51745 - protein, 10 aa, Artificial Sequence
  Description of Artificial Sequence: Synthetic epitope
TRLLAHESTQ

SEQ ID NO: 51746 - protein, 10 aa, Artificial Sequence
  Description of Artificial Sequence: Synthetic epitope
TRLQKLLFKS

SEQ ID NO: 51747 - protein, 10 aa, Artificial Sequence
  Description of Artificial Sequence: Synthetic epitope
TRLRREVYSF

SEQ ID NO: 51748 - protein, 10 aa, Artificial Sequence
  Description of Artificial Sequence: Synthetic epitope
TRLTLKLLGQ

SEQ ID NO: 51749 - protein, 10 aa, Artificial Sequence
  Description of Artificial Sequence: Synthetic epitope
TRLTTSKRLK

SEQ ID NO: 51750 - protein, 10 aa, Artificial Sequence
  Description of Artificial Sequence: Synthetic epitope
TRMEKKMKME

SEQ ID NO: 51751 - protein, 10 aa, Artificial Sequence
  Description of Artificial Sequence: Synthetic epitope
TRMFKQTAIA

SEQ ID NO: 51752 - protein, 10 aa, Artificial Sequence
  Description of Artificial Sequence: Synthetic epitope
TRMQSSEDTE

SEQ ID NO: 51753 - protein, 10 aa, Artificial Sequence
  Description of Artificial Sequence: Synthetic epitope
TRNASSVPSS

SEQ ID NO: 51754 - protein, 10 aa, Artificial Sequence
  Description of Artificial Sequence: Synthetic epitope
TRNEISINST

SEQ ID NO: 51755 - protein, 10 aa, Artificial Sequence
  Description of Artificial Sequence: Synthetic epitope
TRNISATFED

SEQ ID NO: 51756 - protein, 10 aa, Artificial Sequence
  Description of Artificial Sequence: Synthetic epitope
TRNQLSMHRI

SEQ ID NO: 51757 - protein, 10 aa, Artificial Sequence
  Description of Artificial Sequence: Synthetic epitope
TRNTGDESEM

SEQ ID NO: 51758 - protein, 10 aa, Artificial Sequence
  Description of Artificial Sequence: Synthetic epitope
TRNYAKASRN

SEQ ID NO: 51759 - protein, 10 aa, Artificial Sequence
  Description of Artificial Sequence: Synthetic epitope
TRPANHRQLT

SEQ ID NO: 51760 - protein, 10 aa, Artificial Sequence
  Description of Artificial Sequence: Synthetic epitope
TRPDVKQSKM

SEQ ID NO: 51761 - protein, 10 aa, Artificial Sequence
  Description of Artificial Sequence: Synthetic epitope
TRPFGRAKTR

SEQ ID NO: 51762 - protein, 10 aa, Artificial Sequence
  Description of Artificial Sequence: Synthetic epitope
TRPMTLEEME

SEQ ID NO: 51763 - protein, 10 aa, Artificial Sequence
  Description of Artificial Sequence: Synthetic epitope
TRPRKEVKEE

SEQ ID NO: 51764 - protein, 10 aa, Artificial Sequence
  Description of Artificial Sequence: Synthetic epitope
TRPSLQKSQG

SEQ ID NO: 51765 - protein, 10 aa, Artificial Sequence
  Description of Artificial Sequence: Synthetic epitope
TRPVTLVEGE

SEQ ID NO: 51766 - protein, 10 aa, Artificial Sequence
  Description of Artificial Sequence: Synthetic epitope
TRQAGIIQAL

SEQ ID NO: 51767 - protein, 10 aa, Artificial Sequence
  Description of Artificial Sequence: Synthetic epitope
TRQHMRKAVP

SEQ ID NO: 51768 - protein, 10 aa, Artificial Sequence
  Description of Artificial Sequence: Synthetic epitope
TRQLRNSTLQ

SEQ ID NO: 51769 - protein, 10 aa, Artificial Sequence
  Description of Artificial Sequence: Synthetic epitope
TRQQVRALQD

SEQ ID NO: 51770 - protein, 10 aa, Artificial Sequence
  Description of Artificial Sequence: Synthetic epitope
TRQVTALQEE

SEQ ID NO: 51771 - protein, 10 aa, Artificial Sequence
  Description of Artificial Sequence: Synthetic epitope
TRRAKVAPAE

SEQ ID NO: 51772 - protein, 10 aa, Artificial Sequence
  Description of Artificial Sequence: Synthetic epitope
TRRKTSARDA

SEQ ID NO: 51773 - protein, 10 aa, Artificial Sequence
  Description of Artificial Sequence: Synthetic epitope
TRRLNSTQGE

SEQ ID NO: 51774 - protein, 10 aa, Artificial Sequence
  Description of Artificial Sequence: Synthetic epitope
TRRNIDASQL

SEQ ID NO: 51775 - protein, 10 aa, Artificial Sequence
  Description of Artificial Sequence: Synthetic epitope
TRRNLMMEGA

SEQ ID NO: 51776 - protein, 10 aa, Artificial Sequence
  Description of Artificial Sequence: Synthetic epitope
TRRPTTEAPQ

SEQ ID NO: 51777 - protein, 10 aa, Artificial Sequence
  Description of Artificial Sequence: Synthetic epitope
TRRSAHFKHQ

SEQ ID NO: 51778 - protein, 10 aa, Artificial Sequence
  Description of Artificial Sequence: Synthetic epitope
TRRSKTLGQS

SEQ ID NO: 51779 - protein, 10 aa, Artificial Sequence
  Description of Artificial Sequence: Synthetic epitope
TRRVQVAEHP

SEQ ID NO: 51780 - protein, 10 aa, Artificial Sequence
  Description of Artificial Sequence: Synthetic epitope
TRSATQAAKQ

SEQ ID NO: 51781 - protein, 10 aa, Artificial Sequence
  Description of Artificial Sequence: Synthetic epitope
TRSEASEGNI

SEQ ID NO: 51782 - protein, 10 aa, Artificial Sequence
  Description of Artificial Sequence: Synthetic epitope
TRSESLTAES

SEQ ID NO: 51783 - protein, 10 aa, Artificial Sequence
  Description of Artificial Sequence: Synthetic epitope
TRSFARDSSR

SEQ ID NO: 51784 - protein, 10 aa, Artificial Sequence
  Description of Artificial Sequence: Synthetic epitope
TRSISALPTV

SEQ ID NO: 51785 - protein, 10 aa, Artificial Sequence
  Description of Artificial Sequence: Synthetic epitope
TRSKAEKVRP

SEQ ID NO: 51786 - protein, 10 aa, Artificial Sequence
  Description of Artificial Sequence: Synthetic epitope
TRSKQQETVT

SEQ ID NO: 51787 - protein, 10 aa, Artificial Sequence
  Description of Artificial Sequence: Synthetic epitope
TRSKRKATSD

SEQ ID NO: 51788 - protein, 10 aa, Artificial Sequence
  Description of Artificial Sequence: Synthetic epitope
TRSKRLFTAS

SEQ ID NO: 51789 - protein, 10 aa, Artificial Sequence
  Description of Artificial Sequence: Synthetic epitope
TRSKVRSSLV

SEQ ID NO: 51790 - protein, 10 aa, Artificial Sequence
  Description of Artificial Sequence: Synthetic epitope
TRSMALADPE

SEQ ID NO: 51791 - protein, 10 aa, Artificial Sequence
  Description of Artificial Sequence: Synthetic epitope
TRSMTSLAQK

SEQ ID NO: 51792 - protein, 10 aa, Artificial Sequence
  Description of Artificial Sequence: Synthetic epitope
TRSNSIMDSF

SEQ ID NO: 51793 - protein, 10 aa, Artificial Sequence
  Description of Artificial Sequence: Synthetic epitope
TRSPEKKIKR

SEQ ID NO: 51794 - protein, 10 aa, Artificial Sequence
  Description of Artificial Sequence: Synthetic epitope
TRSRSLASSH

SEQ ID NO: 51795 - protein, 10 aa, Artificial Sequence
  Description of Artificial Sequence: Synthetic epitope
TRSSATTLRS

SEQ ID NO: 51796 - protein, 10 aa, Artificial Sequence
  Description of Artificial Sequence: Synthetic epitope
TRSSEKSSGN

SEQ ID NO: 51797 - protein, 10 aa, Artificial Sequence
  Description of Artificial Sequence: Synthetic epitope
TRSSGSTESY

SEQ ID NO: 51798 - protein, 10 aa, Artificial Sequence
  Description of Artificial Sequence: Synthetic epitope
TRSSLSSKKM

SEQ ID NO: 51799 - protein, 10 aa, Artificial Sequence
  Description of Artificial Sequence: Synthetic epitope
TRSSVITSAR

SEQ ID NO: 51800 - protein, 10 aa, Artificial Sequence
  Description of Artificial Sequence: Synthetic epitope
TRSVKASSVL

SEQ ID NO: 51801 - protein, 10 aa, Artificial Sequence
  Description of Artificial Sequence: Synthetic epitope
TRSVLGSSTV

SEQ ID NO: 51802 - protein, 10 aa, Artificial Sequence
  Description of Artificial Sequence: Synthetic epitope
TRSVSASSGP

SEQ ID NO: 51803 - protein, 10 aa, Artificial Sequence
  Description of Artificial Sequence: Synthetic epitope
TRSWQHSSHA

SEQ ID NO: 51804 - protein, 10 aa, Artificial Sequence
  Description of Artificial Sequence: Synthetic epitope
TRTAPSTNSS

SEQ ID NO: 51805 - protein, 10 aa, Artificial Sequence
  Description of Artificial Sequence: Synthetic epitope
TRTAPTSSED

SEQ ID NO: 51806 - protein, 10 aa, Artificial Sequence
  Description of Artificial Sequence: Synthetic epitope
TRTASVKAIT

SEQ ID NO: 51807 - protein, 10 aa, Artificial Sequence
  Description of Artificial Sequence: Synthetic epitope
TRTEVFEISR

SEQ ID NO: 51808 - protein, 10 aa, Artificial Sequence
  Description of Artificial Sequence: Synthetic epitope
TRTGNTVATD

SEQ ID NO: 51809 - protein, 10 aa, Artificial Sequence
  Description of Artificial Sequence: Synthetic epitope
TRTITSQDKP

SEQ ID NO: 51810 - protein, 10 aa, Artificial Sequence
  Description of Artificial Sequence: Synthetic epitope
TRTLKYSTKM

SEQ ID NO: 51811 - protein, 10 aa, Artificial Sequence
  Description of Artificial Sequence: Synthetic epitope
TRTLRLNNSS

SEQ ID NO: 51812 - protein, 10 aa, Artificial Sequence
  Description of Artificial Sequence: Synthetic epitope
TRTMHFEKHW

SEQ ID NO: 51813 - protein, 10 aa, Artificial Sequence
  Description of Artificial Sequence: Synthetic epitope
TRTSERLLDL

SEQ ID NO: 51814 - protein, 10 aa, Artificial Sequence
  Description of Artificial Sequence: Synthetic epitope
TRTSGVQKDK

SEQ ID NO: 51815 - protein, 10 aa, Artificial Sequence
  Description of Artificial Sequence: Synthetic epitope
TRTSKDKSGA

SEQ ID NO: 51816 - protein, 10 aa, Artificial Sequence
  Description of Artificial Sequence: Synthetic epitope
TRTSQETADV

SEQ ID NO: 51817 - protein, 10 aa, Artificial Sequence
  Description of Artificial Sequence: Synthetic epitope
TRTSRQMKDI

SEQ ID NO: 51818 - protein, 10 aa, Artificial Sequence
  Description of Artificial Sequence: Synthetic epitope
TRTTRKKAPR

SEQ ID NO: 51819 - protein, 10 aa, Artificial Sequence
  Description of Artificial Sequence: Synthetic epitope
TRTVSSEDKT

SEQ ID NO: 51820 - protein, 10 aa, Artificial Sequence
  Description of Artificial Sequence: Synthetic epitope
TRVATLGRQL

SEQ ID NO: 51821 - protein, 10 aa, Artificial Sequence
  Description of Artificial Sequence: Synthetic epitope
TRVEPPQYMI

SEQ ID NO: 51822 - protein, 10 aa, Artificial Sequence
  Description of Artificial Sequence: Synthetic epitope
TRVKVGSLQT

SEQ ID NO: 51823 - protein, 10 aa, Artificial Sequence
  Description of Artificial Sequence: Synthetic epitope
TRVQEDQQRT

SEQ ID NO: 51824 - protein, 10 aa, Artificial Sequence
  Description of Artificial Sequence: Synthetic epitope
TRVQSQLQAM

SEQ ID NO: 51825 - protein, 10 aa, Artificial Sequence
  Description of Artificial Sequence: Synthetic epitope
TRVTRTGTVA

SEQ ID NO: 51826 - protein, 10 aa, Artificial Sequence
  Description of Artificial Sequence: Synthetic epitope
TSAADAVEVP

SEQ ID NO: 51827 - protein, 10 aa, Artificial Sequence
  Description of Artificial Sequence: Synthetic epitope
TSAAEARSMA

SEQ ID NO: 51828 - protein, 10 aa, Artificial Sequence
  Description of Artificial Sequence: Synthetic epitope
TSAASVYQPA

SEQ ID NO: 51829 - protein, 10 aa, Artificial Sequence
  Description of Artificial Sequence: Synthetic epitope
TSADDSSASD

SEQ ID NO: 51830 - protein, 10 aa, Artificial Sequence
  Description of Artificial Sequence: Synthetic epitope
TSADSQFSQT

SEQ ID NO: 51831 - protein, 10 aa, Artificial Sequence
  Description of Artificial Sequence: Synthetic epitope
TSADTMKDNE

SEQ ID NO: 51832 - protein, 10 aa, Artificial Sequence
  Description of Artificial Sequence: Synthetic epitope
TSAEHEQNAA

SEQ ID NO: 51833 - protein, 10 aa, Artificial Sequence
  Description of Artificial Sequence: Synthetic epitope
TSAEQDTGEE

SEQ ID NO: 51834 - protein, 10 aa, Artificial Sequence
  Description of Artificial Sequence: Synthetic epitope
TSAESESSEE

SEQ ID NO: 51835 - protein, 10 aa, Artificial Sequence
  Description of Artificial Sequence: Synthetic epitope
TSAGMVREGQ

SEQ ID NO: 51836 - protein, 10 aa, Artificial Sequence
  Description of Artificial Sequence: Synthetic epitope
TSAGQASKNI

SEQ ID NO: 51837 - protein, 10 aa, Artificial Sequence
  Description of Artificial Sequence: Synthetic epitope
TSAHPRHAIT

SEQ ID NO: 51838 - protein, 10 aa, Artificial Sequence
  Description of Artificial Sequence: Synthetic epitope
TSAIEHQLSD

SEQ ID NO: 51839 - protein, 10 aa, Artificial Sequence
  Description of Artificial Sequence: Synthetic epitope
TSAIMDSDLL

SEQ ID NO: 51840 - protein, 10 aa, Artificial Sequence
  Description of Artificial Sequence: Synthetic epitope
TSAKDVVASS

SEQ ID NO: 51841 - protein, 10 aa, Artificial Sequence
  Description of Artificial Sequence: Synthetic epitope
TSAKKASGPA

SEQ ID NO: 51842 - protein, 10 aa, Artificial Sequence
  Description of Artificial Sequence: Synthetic epitope
TSALQQETEK

SEQ ID NO: 51843 - protein, 10 aa, Artificial Sequence
  Description of Artificial Sequence: Synthetic epitope
TSANENSTVL

SEQ ID NO: 51844 - protein, 10 aa, Artificial Sequence
  Description of Artificial Sequence: Synthetic epitope
TSANMRDSAE

SEQ ID NO: 51845 - protein, 10 aa, Artificial Sequence
  Description of Artificial Sequence: Synthetic epitope
TSAPVALSST

SEQ ID NO: 51846 - protein, 10 aa, Artificial Sequence
  Description of Artificial Sequence: Synthetic epitope
TSAQKSSQIG

SEQ ID NO: 51847 - protein, 10 aa, Artificial Sequence
  Description of Artificial Sequence: Synthetic epitope
TSAQRSSIDP

SEQ ID NO: 51848 - protein, 10 aa, Artificial Sequence
  Description of Artificial Sequence: Synthetic epitope
TSARNHRHYQ

SEQ ID NO: 51849 - protein, 10 aa, Artificial Sequence
  Description of Artificial Sequence: Synthetic epitope
TSARNSDSKL

SEQ ID NO: 51850 - protein, 10 aa, Artificial Sequence
  Description of Artificial Sequence: Synthetic epitope
TSASASTSPD

SEQ ID NO: 51851 - protein, 10 aa, Artificial Sequence
  Description of Artificial Sequence: Synthetic epitope
TSASDLLDSQ

SEQ ID NO: 51852 - protein, 10 aa, Artificial Sequence
  Description of Artificial Sequence: Synthetic epitope
TSASGLDTSA

SEQ ID NO: 51853 - protein, 10 aa, Artificial Sequence
  Description of Artificial Sequence: Synthetic epitope
TSASPKKSPP

SEQ ID NO: 51854 - protein, 10 aa, Artificial Sequence
  Description of Artificial Sequence: Synthetic epitope
TSASQSSADL

SEQ ID NO: 51855 - protein, 10 aa, Artificial Sequence
  Description of Artificial Sequence: Synthetic epitope
TSASRFQSDK

SEQ ID NO: 51856 - protein, 10 aa, Artificial Sequence
  Description of Artificial Sequence: Synthetic epitope
TSASTESLLE

SEQ ID NO: 51857 - protein, 10 aa, Artificial Sequence
  Description of Artificial Sequence: Synthetic epitope
TSATAHETVA

SEQ ID NO: 51858 - protein, 10 aa, Artificial Sequence
  Description of Artificial Sequence: Synthetic epitope
TSATIDVTTV

SEQ ID NO: 51859 - protein, 10 aa, Artificial Sequence
  Description of Artificial Sequence: Synthetic epitope
TSATQPSETF

SEQ ID NO: 51860 - protein, 10 aa, Artificial Sequence
  Description of Artificial Sequence: Synthetic epitope
TSAVEGAQSQ

SEQ ID NO: 51861 - protein, 10 aa, Artificial Sequence
  Description of Artificial Sequence: Synthetic epitope
TSAVKEKTAT

SEQ ID NO: 51862 - protein, 10 aa, Artificial Sequence
  Description of Artificial Sequence: Synthetic epitope
TSAVKNLQQL

SEQ ID NO: 51863 - protein, 10 aa, Artificial Sequence
  Description of Artificial Sequence: Synthetic epitope
TSDAVELANR

SEQ ID NO: 51864 - protein, 10 aa, Artificial Sequence
  Description of Artificial Sequence: Synthetic epitope
TSDAVIEKAD

SEQ ID NO: 51865 - protein, 10 aa, Artificial Sequence
  Description of Artificial Sequence: Synthetic epitope
TSDEGSMNAF

SEQ ID NO: 51866 - protein, 10 aa, Artificial Sequence
  Description of Artificial Sequence: Synthetic epitope
TSDETRGAEG

SEQ ID NO: 51867 - protein, 10 aa, Artificial Sequence
  Description of Artificial Sequence: Synthetic epitope
TSDFSITPQI

SEQ ID NO: 51868 - protein, 10 aa, Artificial Sequence
  Description of Artificial Sequence: Synthetic epitope
TSDGAFELAP

SEQ ID NO: 51869 - protein, 10 aa, Artificial Sequence
  Description of Artificial Sequence: Synthetic epitope
TSDHTDVHVP

SEQ ID NO: 51870 - protein, 10 aa, Artificial Sequence
  Description of Artificial Sequence: Synthetic epitope
TSDIIMSDSY

SEQ ID NO: 51871 - protein, 10 aa, Artificial Sequence
  Description of Artificial Sequence: Synthetic epitope
TSDMIAERQG

SEQ ID NO: 51872 - protein, 10 aa, Artificial Sequence
  Description of Artificial Sequence: Synthetic epitope
TSDPRRSIVE

SEQ ID NO: 51873 - protein, 10 aa, Artificial Sequence
  Description of Artificial Sequence: Synthetic epitope
TSDQAKHTEH

SEQ ID NO: 51874 - protein, 10 aa, Artificial Sequence
  Description of Artificial Sequence: Synthetic epitope
TSDSATQDNS

SEQ ID NO: 51875 - protein, 10 aa, Artificial Sequence
  Description of Artificial Sequence: Synthetic epitope
TSDSILLKFL

SEQ ID NO: 51876 - protein, 10 aa, Artificial Sequence
  Description of Artificial Sequence: Synthetic epitope
TSDSLSEADE

SEQ ID NO: 51877 - protein, 10 aa, Artificial Sequence
  Description of Artificial Sequence: Synthetic epitope
TSDSLSRSKN

SEQ ID NO: 51878 - protein, 10 aa, Artificial Sequence
  Description of Artificial Sequence: Synthetic epitope
TSDSMEEGEI

SEQ ID NO: 51879 - protein, 10 aa, Artificial Sequence
  Description of Artificial Sequence: Synthetic epitope
TSEADNILLA

SEQ ID NO: 51880 - protein, 10 aa, Artificial Sequence
  Description of Artificial Sequence: Synthetic epitope
TSEAQELTTV

SEQ ID NO: 51881 - protein, 10 aa, Artificial Sequence
  Description of Artificial Sequence: Synthetic epitope
TSEATEIIEG

SEQ ID NO: 51882 - protein, 10 aa, Artificial Sequence
  Description of Artificial Sequence: Synthetic epitope
TSEDMGRTTS

SEQ ID NO: 51883 - protein, 10 aa, Artificial Sequence
  Description of Artificial Sequence: Synthetic epitope
TSEELKATPE

SEQ ID NO: 51884 - protein, 10 aa, Artificial Sequence
  Description of Artificial Sequence: Synthetic epitope
TSEELSQLQE

SEQ ID NO: 51885 - protein, 10 aa, Artificial Sequence
  Description of Artificial Sequence: Synthetic epitope
TSEEMEQSGE

SEQ ID NO: 51886 - protein, 10 aa, Artificial Sequence
  Description of Artificial Sequence: Synthetic epitope
TSEERTKHDR

SEQ ID NO: 51887 - protein, 10 aa, Artificial Sequence
  Description of Artificial Sequence: Synthetic epitope
TSEHAETSTE

SEQ ID NO: 51888 - protein, 10 aa, Artificial Sequence
  Description of Artificial Sequence: Synthetic epitope
TSEISIMDHQ

SEQ ID NO: 51889 - protein, 10 aa, Artificial Sequence
  Description of Artificial Sequence: Synthetic epitope
TSEKAITSKK

SEQ ID NO: 51890 - protein, 10 aa, Artificial Sequence
  Description of Artificial Sequence: Synthetic epitope
TSEKEASYDE

SEQ ID NO: 51891 - protein, 10 aa, Artificial Sequence
  Description of Artificial Sequence: Synthetic epitope
TSEKMANIEQ

SEQ ID NO: 51892 - protein, 10 aa, Artificial Sequence
  Description of Artificial Sequence: Synthetic epitope
TSEKSQTPLV

SEQ ID NO: 51893 - protein, 10 aa, Artificial Sequence
  Description of Artificial Sequence: Synthetic epitope
TSEKVSKASS

SEQ ID NO: 51894 - protein, 10 aa, Artificial Sequence
  Description of Artificial Sequence: Synthetic epitope
TSEKVSLIDM

SEQ ID NO: 51895 - protein, 10 aa, Artificial Sequence
  Description of Artificial Sequence: Synthetic epitope
TSENKLTISE

SEQ ID NO: 51896 - protein, 10 aa, Artificial Sequence
  Description of Artificial Sequence: Synthetic epitope
TSENKVIEPQ

SEQ ID NO: 51897 - protein, 10 aa, Artificial Sequence
  Description of Artificial Sequence: Synthetic epitope
TSERLFAQRE

SEQ ID NO: 51898 - protein, 10 aa, Artificial Sequence
  Description of Artificial Sequence: Synthetic epitope
TSESHGHPSS

SEQ ID NO: 51899 - protein, 10 aa, Artificial Sequence
  Description of Artificial Sequence: Synthetic epitope
TSESHSGTLS

SEQ ID NO: 51900 - protein, 10 aa, Artificial Sequence
  Description of Artificial Sequence: Synthetic epitope
TSESSRYQFR

SEQ ID NO: 51901 - protein, 10 aa, Artificial Sequence
  Description of Artificial Sequence: Synthetic epitope
TSESTIKSIP

SEQ ID NO: 51902 - protein, 10 aa, Artificial Sequence
  Description of Artificial Sequence: Synthetic epitope
TSESYSSEEM

SEQ ID NO: 51903 - protein, 10 aa, Artificial Sequence
  Description of Artificial Sequence: Synthetic epitope
TSETEAKINT

SEQ ID NO: 51904 - protein, 10 aa, Artificial Sequence
  Description of Artificial Sequence: Synthetic epitope
TSETGFRTIS

SEQ ID NO: 51905 - protein, 10 aa, Artificial Sequence
  Description of Artificial Sequence: Synthetic epitope
TSETSGILQD

SEQ ID NO: 51906 - protein, 10 aa, Artificial Sequence
  Description of Artificial Sequence: Synthetic epitope
TSEVNDIITT

SEQ ID NO: 51907 - protein, 10 aa, Artificial Sequence
  Description of Artificial Sequence: Synthetic epitope
TSEWHVTAQR

SEQ ID NO: 51908 - protein, 10 aa, Artificial Sequence
  Description of Artificial Sequence: Synthetic epitope
TSFKDNDTKH

SEQ ID NO: 51909 - protein, 10 aa, Artificial Sequence
  Description of Artificial Sequence: Synthetic epitope
TSFKESIVDE

SEQ ID NO: 51910 - protein, 10 aa, Artificial Sequence
  Description of Artificial Sequence: Synthetic epitope
TSFKITDLGK

SEQ ID NO: 51911 - protein, 10 aa, Artificial Sequence
  Description of Artificial Sequence: Synthetic epitope
TSFKTWKESQ

SEQ ID NO: 51912 - protein, 10 aa, Artificial Sequence
  Description of Artificial Sequence: Synthetic epitope
TSFPMTVKVD

SEQ ID NO: 51913 - protein, 10 aa, Artificial Sequence
  Description of Artificial Sequence: Synthetic epitope
TSFQARQLIL

SEQ ID NO: 51914 - protein, 10 aa, Artificial Sequence
  Description of Artificial Sequence: Synthetic epitope
TSFTLNAADR

SEQ ID NO: 51915 - protein, 10 aa, Artificial Sequence
  Description of Artificial Sequence: Synthetic epitope
TSGEGMKAGA

SEQ ID NO: 51916 - protein, 10 aa, Artificial Sequence
  Description of Artificial Sequence: Synthetic epitope
TSGEKESDSS

SEQ ID NO: 51917 - protein, 10 aa, Artificial Sequence
  Description of Artificial Sequence: Synthetic epitope
TSGESQTTYS

SEQ ID NO: 51918 - protein, 10 aa, Artificial Sequence
  Description of Artificial Sequence: Synthetic epitope
TSGFTMNPQA

SEQ ID NO: 51919 - protein, 10 aa, Artificial Sequence
  Description of Artificial Sequence: Synthetic epitope
TSGIQTEWSP

SEQ ID NO: 51920 - protein, 10 aa, Artificial Sequence
  Description of Artificial Sequence: Synthetic epitope
TSGIVTSIPV

SEQ ID NO: 51921 - protein, 10 aa, Artificial Sequence
  Description of Artificial Sequence: Synthetic epitope
TSGKRSHLES

SEQ ID NO: 51922 - protein, 10 aa, Artificial Sequence
  Description of Artificial Sequence: Synthetic epitope
TSGKSEVRDL

SEQ ID NO: 51923 - protein, 10 aa, Artificial Sequence
  Description of Artificial Sequence: Synthetic epitope
TSGKTTSSTD

SEQ ID NO: 51924 - protein, 10 aa, Artificial Sequence
  Description of Artificial Sequence: Synthetic epitope
TSGLEAKATA

SEQ ID NO: 51925 - protein, 10 aa, Artificial Sequence
  Description of Artificial Sequence: Synthetic epitope
TSGLKTLSDK

SEQ ID NO: 51926 - protein, 10 aa, Artificial Sequence
  Description of Artificial Sequence: Synthetic epitope
TSGLTESTQK

SEQ ID NO: 51927 - protein, 10 aa, Artificial Sequence
  Description of Artificial Sequence: Synthetic epitope
TSGLTQSLTP

SEQ ID NO: 51928 - protein, 10 aa, Artificial Sequence
  Description of Artificial Sequence: Synthetic epitope
TSGNEASEIE

SEQ ID NO: 51929 - protein, 10 aa, Artificial Sequence
  Description of Artificial Sequence: Synthetic epitope
TSGQEATESA

SEQ ID NO: 51930 - protein, 10 aa, Artificial Sequence
  Description of Artificial Sequence: Synthetic epitope
TSGRQHTTFS

SEQ ID NO: 51931 - protein, 10 aa, Artificial Sequence
  Description of Artificial Sequence: Synthetic epitope
TSGRQLAAGN

SEQ ID NO: 51932 - protein, 10 aa, Artificial Sequence
  Description of Artificial Sequence: Synthetic epitope
TSGSMYRIKS

SEQ ID NO: 51933 - protein, 10 aa, Artificial Sequence
  Description of Artificial Sequence: Synthetic epitope
TSGSQGQQTQ

SEQ ID NO: 51934 - protein, 10 aa, Artificial Sequence
  Description of Artificial Sequence: Synthetic epitope
TSGSRESNMS

SEQ ID NO: 51935 - protein, 10 aa, Artificial Sequence
  Description of Artificial Sequence: Synthetic epitope
TSGTIKETDD

SEQ ID NO: 51936 - protein, 10 aa, Artificial Sequence
  Description of Artificial Sequence: Synthetic epitope
TSGTKSTKHS

SEQ ID NO: 51937 - protein, 10 aa, Artificial Sequence
  Description of Artificial Sequence: Synthetic epitope
TSGTSNTRGS

SEQ ID NO: 51938 - protein, 10 aa, Artificial Sequence
  Description of Artificial Sequence: Synthetic epitope
TSGTSTEPVK

SEQ ID NO: 51939 - protein, 10 aa, Artificial Sequence
  Description of Artificial Sequence: Synthetic epitope
TSGVRLKNLS

SEQ ID NO: 51940 - protein, 10 aa, Artificial Sequence
  Description of Artificial Sequence: Synthetic epitope
TSGVSSYQHT

SEQ ID NO: 51941 - protein, 10 aa, Artificial Sequence
  Description of Artificial Sequence: Synthetic epitope
TSGYGVSLFS

SEQ ID NO: 51942 - protein, 10 aa, Artificial Sequence
  Description of Artificial Sequence: Synthetic epitope
TSGYSESKKD

SEQ ID NO: 51943 - protein, 10 aa, Artificial Sequence
  Description of Artificial Sequence: Synthetic epitope
TSGYSQSSQV

SEQ ID NO: 51944 - protein, 10 aa, Artificial Sequence
  Description of Artificial Sequence: Synthetic epitope
TSHGVSDLES

SEQ ID NO: 51945 - protein, 10 aa, Artificial Sequence
  Description of Artificial Sequence: Synthetic epitope
TSHLASAIDL

SEQ ID NO: 51946 - protein, 10 aa, Artificial Sequence
  Description of Artificial Sequence: Synthetic epitope
TSHQMLSSTE

SEQ ID NO: 51947 - protein, 10 aa, Artificial Sequence
  Description of Artificial Sequence: Synthetic epitope
TSHSDASTKQ

SEQ ID NO: 51948 - protein, 10 aa, Artificial Sequence
  Description of Artificial Sequence: Synthetic epitope
TSHTSKLQVN

SEQ ID NO: 51949 - protein, 10 aa, Artificial Sequence
  Description of Artificial Sequence: Synthetic epitope
TSIASRGAPE

SEQ ID NO: 51950 - protein, 10 aa, Artificial Sequence
  Description of Artificial Sequence: Synthetic epitope
TSIESETAAS

SEQ ID NO: 51951 - protein, 10 aa, Artificial Sequence
  Description of Artificial Sequence: Synthetic epitope
TSIEYQWIQG

SEQ ID NO: 51952 - protein, 10 aa, Artificial Sequence
  Description of Artificial Sequence: Synthetic epitope
TSIKGASQKE

SEQ ID NO: 51953 - protein, 10 aa, Artificial Sequence
  Description of Artificial Sequence: Synthetic epitope
TSIKSEESSI

SEQ ID NO: 51954 - protein, 10 aa, Artificial Sequence
  Description of Artificial Sequence: Synthetic epitope
TSINTLGTER

SEQ ID NO: 51955 - protein, 10 aa, Artificial Sequence
  Description of Artificial Sequence: Synthetic epitope
TSIQQLFQLS

SEQ ID NO: 51956 - protein, 10 aa, Artificial Sequence
  Description of Artificial Sequence: Synthetic epitope
TSISAKEANA

SEQ ID NO: 51957 - protein, 10 aa, Artificial Sequence
  Description of Artificial Sequence: Synthetic epitope
TSISEASADT

SEQ ID NO: 51958 - protein, 10 aa, Artificial Sequence
  Description of Artificial Sequence: Synthetic epitope
TSISSRKRGK

SEQ ID NO: 51959 - protein, 10 aa, Artificial Sequence
  Description of Artificial Sequence: Synthetic epitope
TSISVNKLFV

SEQ ID NO: 51960 - protein, 10 aa, Artificial Sequence
  Description of Artificial Sequence: Synthetic epitope
TSITSDPKAD

SEQ ID NO: 51961 - protein, 10 aa, Artificial Sequence
  Description of Artificial Sequence: Synthetic epitope
TSKAAILETA

SEQ ID NO: 51962 - protein, 10 aa, Artificial Sequence
  Description of Artificial Sequence: Synthetic epitope
TSKASNLEGE

SEQ ID NO: 51963 - protein, 10 aa, Artificial Sequence
  Description of Artificial Sequence: Synthetic epitope
TSKDVLSNLV

SEQ ID NO: 51964 - protein, 10 aa, Artificial Sequence
  Description of Artificial Sequence: Synthetic epitope
TSKEADLTEE

SEQ ID NO: 51965 - protein, 10 aa, Artificial Sequence
  Description of Artificial Sequence: Synthetic epitope
TSKEAFFSRV

SEQ ID NO: 51966 - protein, 10 aa, Artificial Sequence
  Description of Artificial Sequence: Synthetic epitope
TSKEHLASKI

SEQ ID NO: 51967 - protein, 10 aa, Artificial Sequence
  Description of Artificial Sequence: Synthetic epitope
TSKEKTSINL

SEQ ID NO: 51968 - protein, 10 aa, Artificial Sequence
  Description of Artificial Sequence: Synthetic epitope
TSKEQEAKYQ

SEQ ID NO: 51969 - protein, 10 aa, Artificial Sequence
  Description of Artificial Sequence: Synthetic epitope
TSKETKKDTK

SEQ ID NO: 51970 - protein, 10 aa, Artificial Sequence
  Description of Artificial Sequence: Synthetic epitope
TSKILFVSQG

SEQ ID NO: 51971 - protein, 10 aa, Artificial Sequence
  Description of Artificial Sequence: Synthetic epitope
TSKINEENTA

SEQ ID NO: 51972 - protein, 10 aa, Artificial Sequence
  Description of Artificial Sequence: Synthetic epitope
TSKISSTRNE

SEQ ID NO: 51973 - protein, 10 aa, Artificial Sequence
  Description of Artificial Sequence: Synthetic epitope
TSKKDKKDER

SEQ ID NO: 51974 - protein, 10 aa, Artificial Sequence
  Description of Artificial Sequence: Synthetic epitope
TSKKSKGESD

SEQ ID NO: 51975 - protein, 10 aa, Artificial Sequence
  Description of Artificial Sequence: Synthetic epitope
TSKKTKDQLI

SEQ ID NO: 51976 - protein, 10 aa, Artificial Sequence
  Description of Artificial Sequence: Synthetic epitope
TSKKTRKEDH

SEQ ID NO: 51977 - protein, 10 aa, Artificial Sequence
  Description of Artificial Sequence: Synthetic epitope
TSKKYKGTVA

SEQ ID NO: 51978 - protein, 10 aa, Artificial Sequence
  Description of Artificial Sequence: Synthetic epitope
TSKLIRSHPT

SEQ ID NO: 51979 - protein, 10 aa, Artificial Sequence
  Description of Artificial Sequence: Synthetic epitope
TSKLKASQAE

SEQ ID NO: 51980 - protein, 10 aa, Artificial Sequence
  Description of Artificial Sequence: Synthetic epitope
TSKLLTMQSS

SEQ ID NO: 51981 - protein, 10 aa, Artificial Sequence
  Description of Artificial Sequence: Synthetic epitope
TSKNAQLQSE

SEQ ID NO: 51982 - protein, 10 aa, Artificial Sequence
  Description of Artificial Sequence: Synthetic epitope
TSKNISKAKQ

SEQ ID NO: 51983 - protein, 10 aa, Artificial Sequence
  Description of Artificial Sequence: Synthetic epitope
TSKPTEILTK

SEQ ID NO: 51984 - protein, 10 aa, Artificial Sequence
  Description of Artificial Sequence: Synthetic epitope
TSKQEKEARA

SEQ ID NO: 51985 - protein, 10 aa, Artificial Sequence
  Description of Artificial Sequence: Synthetic epitope
TSKQLLAEES

SEQ ID NO: 51986 - protein, 10 aa, Artificial Sequence
  Description of Artificial Sequence: Synthetic epitope
TSKQMDLLQE

SEQ ID NO: 51987 - protein, 10 aa, Artificial Sequence
  Description of Artificial Sequence: Synthetic epitope
TSKQYTGNSN

SEQ ID NO: 51988 - protein, 10 aa, Artificial Sequence
  Description of Artificial Sequence: Synthetic epitope
TSKRTSVFPN

SEQ ID NO: 51989 - protein, 10 aa, Artificial Sequence
  Description of Artificial Sequence: Synthetic epitope
TSKRVYKQAV

SEQ ID NO: 51990 - protein, 10 aa, Artificial Sequence
  Description of Artificial Sequence: Synthetic epitope
TSKSASVWSK

SEQ ID NO: 51991 - protein, 10 aa, Artificial Sequence
  Description of Artificial Sequence: Synthetic epitope
TSKSEKDAVS

SEQ ID NO: 51992 - protein, 10 aa, Artificial Sequence
  Description of Artificial Sequence: Synthetic epitope
TSKSESNEDL

SEQ ID NO: 51993 - protein, 10 aa, Artificial Sequence
  Description of Artificial Sequence: Synthetic epitope
TSKSKKRKTS

SEQ ID NO: 51994 - protein, 10 aa, Artificial Sequence
  Description of Artificial Sequence: Synthetic epitope
TSKSKLKTHL

SEQ ID NO: 51995 - protein, 10 aa, Artificial Sequence
  Description of Artificial Sequence: Synthetic epitope
TSKSQDVRQA

SEQ ID NO: 51996 - protein, 10 aa, Artificial Sequence
  Description of Artificial Sequence: Synthetic epitope
TSKSSKIRSL

SEQ ID NO: 51997 - protein, 10 aa, Artificial Sequence
  Description of Artificial Sequence: Synthetic epitope
TSKSVFEPED

SEQ ID NO: 51998 - protein, 10 aa, Artificial Sequence
  Description of Artificial Sequence: Synthetic epitope
TSKSVQVDYM

SEQ ID NO: 51999 - protein, 10 aa, Artificial Sequence
  Description of Artificial Sequence: Synthetic epitope
TSKTRPKQEK

SEQ ID NO: 52000 - protein, 10 aa, Artificial Sequence
  Description of Artificial Sequence: Synthetic epitope
TSKVLTTKEK

SEQ ID NO: 52001 - protein, 10 aa, Artificial Sequence
  Description of Artificial Sequence: Synthetic epitope
TSKWITDKTK

SEQ ID NO: 52002 - protein, 10 aa, Artificial Sequence
  Description of Artificial Sequence: Synthetic epitope
TSLAEESKFL

SEQ ID NO: 52003 - protein, 10 aa, Artificial Sequence
  Description of Artificial Sequence: Synthetic epitope
TSLAEESKFL

SEQ ID NO: 52004 - protein, 10 aa, Artificial Sequence
  Description of Artificial Sequence: Synthetic epitope
TSLAKMKLRE

SEQ ID NO: 52005 - protein, 10 aa, Artificial Sequence
  Description of Artificial Sequence: Synthetic epitope
TSLAKTVNLS

SEQ ID NO: 52006 - protein, 10 aa, Artificial Sequence
  Description of Artificial Sequence: Synthetic epitope
TSLARNEAPA

SEQ ID NO: 52007 - protein, 10 aa, Artificial Sequence
  Description of Artificial Sequence: Synthetic epitope
TSLASASNEN

SEQ ID NO: 52008 - protein, 10 aa, Artificial Sequence
  Description of Artificial Sequence: Synthetic epitope
TSLATILDGG

SEQ ID NO: 52009 - protein, 10 aa, Artificial Sequence
  Description of Artificial Sequence: Synthetic epitope
TSLDYESEGD

SEQ ID NO: 52010 - protein, 10 aa, Artificial Sequence
  Description of Artificial Sequence: Synthetic epitope
TSLEAELQAK

SEQ ID NO: 52011 - protein, 10 aa, Artificial Sequence
  Description of Artificial Sequence: Synthetic epitope
TSLEIQILIH

SEQ ID NO: 52012 - protein, 10 aa, Artificial Sequence
  Description of Artificial Sequence: Synthetic epitope
TSLEQKRLEK

SEQ ID NO: 52013 - protein, 10 aa, Artificial Sequence
  Description of Artificial Sequence: Synthetic epitope
TSLESFTNAP

SEQ ID NO: 52014 - protein, 10 aa, Artificial Sequence
  Description of Artificial Sequence: Synthetic epitope
TSLETATEKV

SEQ ID NO: 52015 - protein, 10 aa, Artificial Sequence
  Description of Artificial Sequence: Synthetic epitope
TSLFTTMKTE

SEQ ID NO: 52016 - protein, 10 aa, Artificial Sequence
  Description of Artificial Sequence: Synthetic epitope
TSLGRKTDAK

SEQ ID NO: 52017 - protein, 10 aa, Artificial Sequence
  Description of Artificial Sequence: Synthetic epitope
TSLIKLVKDK

SEQ ID NO: 52018 - protein, 10 aa, Artificial Sequence
  Description of Artificial Sequence: Synthetic epitope
TSLIQKIWDD

SEQ ID NO: 52019 - protein, 10 aa, Artificial Sequence
  Description of Artificial Sequence: Synthetic epitope
TSLISIPLSL

SEQ ID NO: 52020 - protein, 10 aa, Artificial Sequence
  Description of Artificial Sequence: Synthetic epitope
TSLKEGTIAK

SEQ ID NO: 52021 - protein, 10 aa, Artificial Sequence
  Description of Artificial Sequence: Synthetic epitope
TSLKERLLAI

SEQ ID NO: 52022 - protein, 10 aa, Artificial Sequence
  Description of Artificial Sequence: Synthetic epitope
TSLKKTLATT

SEQ ID NO: 52023 - protein, 10 aa, Artificial Sequence
  Description of Artificial Sequence: Synthetic epitope
TSLKQTTVEE

SEQ ID NO: 52024 - protein, 10 aa, Artificial Sequence
  Description of Artificial Sequence: Synthetic epitope
TSLKSVNGQI

SEQ ID NO: 52025 - protein, 10 aa, Artificial Sequence
  Description of Artificial Sequence: Synthetic epitope
TSLLETAREF

SEQ ID NO: 52026 - protein, 10 aa, Artificial Sequence
  Description of Artificial Sequence: Synthetic epitope
TSLLKIIKLQ

SEQ ID NO: 52027 - protein, 10 aa, Artificial Sequence
  Description of Artificial Sequence: Synthetic epitope
TSLLSSFLRS

SEQ ID NO: 52028 - protein, 10 aa, Artificial Sequence
  Description of Artificial Sequence: Synthetic epitope
TSLLTGSVKR

SEQ ID NO: 52029 - protein, 10 aa, Artificial Sequence
  Description of Artificial Sequence: Synthetic epitope
TSLNEAMNVS

SEQ ID NO: 52030 - protein, 10 aa, Artificial Sequence
  Description of Artificial Sequence: Synthetic epitope
TSLNMSTHQL

SEQ ID NO: 52031 - protein, 10 aa, Artificial Sequence
  Description of Artificial Sequence: Synthetic epitope
TSLPNLLSAE

SEQ ID NO: 52032 - protein, 10 aa, Artificial Sequence
  Description of Artificial Sequence: Synthetic epitope
TSLQGNEGDQ

SEQ ID NO: 52033 - protein, 10 aa, Artificial Sequence
  Description of Artificial Sequence: Synthetic epitope
TSLQNSFQLR

SEQ ID NO: 52034 - protein, 10 aa, Artificial Sequence
  Description of Artificial Sequence: Synthetic epitope
TSLQRSQSNP

SEQ ID NO: 52035 - protein, 10 aa, Artificial Sequence
  Description of Artificial Sequence: Synthetic epitope
TSLSKFQTSH

SEQ ID NO: 52036 - protein, 10 aa, Artificial Sequence
  Description of Artificial Sequence: Synthetic epitope
TSLSKSLDKS

SEQ ID NO: 52037 - protein, 10 aa, Artificial Sequence
  Description of Artificial Sequence: Synthetic epitope
TSLSSIKQSP

SEQ ID NO: 52038 - protein, 10 aa, Artificial Sequence
  Description of Artificial Sequence: Synthetic epitope
TSLSTQQIVK

SEQ ID NO: 52039 - protein, 10 aa, Artificial Sequence
  Description of Artificial Sequence: Synthetic epitope
TSLSVADTVS

SEQ ID NO: 52040 - protein, 10 aa, Artificial Sequence
  Description of Artificial Sequence: Synthetic epitope
TSLTDEELVT

SEQ ID NO: 52041 - protein, 10 aa, Artificial Sequence
  Description of Artificial Sequence: Synthetic epitope
TSLTSSDTLV

SEQ ID NO: 52042 - protein, 10 aa, Artificial Sequence
  Description of Artificial Sequence: Synthetic epitope
TSLTSSVQES

SEQ ID NO: 52043 - protein, 10 aa, Artificial Sequence
  Description of Artificial Sequence: Synthetic epitope
TSLTVSFQEP

SEQ ID NO: 52044 - protein, 10 aa, Artificial Sequence
  Description of Artificial Sequence: Synthetic epitope
TSLVAGLSTE

SEQ ID NO: 52045 - protein, 10 aa, Artificial Sequence
  Description of Artificial Sequence: Synthetic epitope
TSMFEYLAPP

SEQ ID NO: 52046 - protein, 10 aa, Artificial Sequence
  Description of Artificial Sequence: Synthetic epitope
TSMFGSATTD

SEQ ID NO: 52047 - protein, 10 aa, Artificial Sequence
  Description of Artificial Sequence: Synthetic epitope
TSMLSPKSYY

SEQ ID NO: 52048 - protein, 10 aa, Artificial Sequence
  Description of Artificial Sequence: Synthetic epitope
TSMLVVDAPQ

SEQ ID NO: 52049 - protein, 10 aa, Artificial Sequence
  Description of Artificial Sequence: Synthetic epitope
TSMQDEQPSD

SEQ ID NO: 52050 - protein, 10 aa, Artificial Sequence
  Description of Artificial Sequence: Synthetic epitope
TSMTGATGSE

SEQ ID NO: 52051 - protein, 10 aa, Artificial Sequence
  Description of Artificial Sequence: Synthetic epitope
TSNIARIEEM

SEQ ID NO: 52052 - protein, 10 aa, Artificial Sequence
  Description of Artificial Sequence: Synthetic epitope
TSNIQSSASQ

SEQ ID NO: 52053 - protein, 10 aa, Artificial Sequence
  Description of Artificial Sequence: Synthetic epitope
TSNKNSDNNL

SEQ ID NO: 52054 - protein, 10 aa, Artificial Sequence
  Description of Artificial Sequence: Synthetic epitope
TSNLEKSSQE

SEQ ID NO: 52055 - protein, 10 aa, Artificial Sequence
  Description of Artificial Sequence: Synthetic epitope
TSNLKEAHNR

SEQ ID NO: 52056 - protein, 10 aa, Artificial Sequence
  Description of Artificial Sequence: Synthetic epitope
TSNLSKVRQS

SEQ ID NO: 52057 - protein, 10 aa, Artificial Sequence
  Description of Artificial Sequence: Synthetic epitope
TSNNIDVKKM

SEQ ID NO: 52058 - protein, 10 aa, Artificial Sequence
  Description of Artificial Sequence: Synthetic epitope
TSNPTVQLKI

SEQ ID NO: 52059 - protein, 10 aa, Artificial Sequence
  Description of Artificial Sequence: Synthetic epitope
TSNRSSTRSL

SEQ ID NO: 52060 - protein, 10 aa, Artificial Sequence
  Description of Artificial Sequence: Synthetic epitope
TSNSFDVISD

SEQ ID NO: 52061 - protein, 10 aa, Artificial Sequence
  Description of Artificial Sequence: Synthetic epitope
TSNSLPRSKT

SEQ ID NO: 52062 - protein, 10 aa, Artificial Sequence
  Description of Artificial Sequence: Synthetic epitope
TSNSSLPLEI

SEQ ID NO: 52063 - protein, 10 aa, Artificial Sequence
  Description of Artificial Sequence: Synthetic epitope
TSNSSLTADV

SEQ ID NO: 52064 - protein, 10 aa, Artificial Sequence
  Description of Artificial Sequence: Synthetic epitope
TSNSSTLSLK

SEQ ID NO: 52065 - protein, 10 aa, Artificial Sequence
  Description of Artificial Sequence: Synthetic epitope
TSNSTNKSQH

SEQ ID NO: 52066 - protein, 10 aa, Artificial Sequence
  Description of Artificial Sequence: Synthetic epitope
TSNSTTDLPK

SEQ ID NO: 52067 - protein, 10 aa, Artificial Sequence
  Description of Artificial Sequence: Synthetic epitope
TSNTSAENLT

SEQ ID NO: 52068 - protein, 10 aa, Artificial Sequence
  Description of Artificial Sequence: Synthetic epitope
TSNYSTSSHA

SEQ ID NO: 52069 - protein, 10 aa, Artificial Sequence
  Description of Artificial Sequence: Synthetic epitope
TSPASAGSSD

SEQ ID NO: 52070 - protein, 10 aa, Artificial Sequence
  Description of Artificial Sequence: Synthetic epitope
TSPAVALSAN

SEQ ID NO: 52071 - protein, 10 aa, Artificial Sequence
  Description of Artificial Sequence: Synthetic epitope
TSPDASQSTE

SEQ ID NO: 52072 - protein, 10 aa, Artificial Sequence
  Description of Artificial Sequence: Synthetic epitope
TSPEASTLST

SEQ ID NO: 52073 - protein, 10 aa, Artificial Sequence
  Description of Artificial Sequence: Synthetic epitope
TSPLNLSYFY

SEQ ID NO: 52074 - protein, 10 aa, Artificial Sequence
  Description of Artificial Sequence: Synthetic epitope
TSPLNSKIGA

SEQ ID NO: 52075 - protein, 10 aa, Artificial Sequence
  Description of Artificial Sequence: Synthetic epitope
TSPLSAEKHS

SEQ ID NO: 52076 - protein, 10 aa, Artificial Sequence
  Description of Artificial Sequence: Synthetic epitope
TSPPSVLSTQ

SEQ ID NO: 52077 - protein, 10 aa, Artificial Sequence
  Description of Artificial Sequence: Synthetic epitope
TSPTSKYNRD

SEQ ID NO: 52078 - protein, 10 aa, Artificial Sequence
  Description of Artificial Sequence: Synthetic epitope
TSQATSGANS

SEQ ID NO: 52079 - protein, 10 aa, Artificial Sequence
  Description of Artificial Sequence: Synthetic epitope
TSQAVDQSKV

SEQ ID NO: 52080 - protein, 10 aa, Artificial Sequence
  Description of Artificial Sequence: Synthetic epitope
TSQAVSSTGG

SEQ ID NO: 52081 - protein, 10 aa, Artificial Sequence
  Description of Artificial Sequence: Synthetic epitope
TSQDAVERAQ

SEQ ID NO: 52082 - protein, 10 aa, Artificial Sequence
  Description of Artificial Sequence: Synthetic epitope
TSQDIAEVTQ

SEQ ID NO: 52083 - protein, 10 aa, Artificial Sequence
  Description of Artificial Sequence: Synthetic epitope
TSQEDLVEKK

SEQ ID NO: 52084 - protein, 10 aa, Artificial Sequence
  Description of Artificial Sequence: Synthetic epitope
TSQGPRRTMG

SEQ ID NO: 52085 - protein, 10 aa, Artificial Sequence
  Description of Artificial Sequence: Synthetic epitope
TSQIRKASNT

SEQ ID NO: 52086 - protein, 10 aa, Artificial Sequence
  Description of Artificial Sequence: Synthetic epitope
TSQSAAQLRG

SEQ ID NO: 52087 - protein, 10 aa, Artificial Sequence
  Description of Artificial Sequence: Synthetic epitope
TSQSLRENQQ

SEQ ID NO: 52088 - protein, 10 aa, Artificial Sequence
  Description of Artificial Sequence: Synthetic epitope
TSQSRSSKDA

SEQ ID NO: 52089 - protein, 10 aa, Artificial Sequence
  Description of Artificial Sequence: Synthetic epitope
TSQSSVDSTI

SEQ ID NO: 52090 - protein, 10 aa, Artificial Sequence
  Description of Artificial Sequence: Synthetic epitope
TSQSTSQSVY

SEQ ID NO: 52091 - protein, 10 aa, Artificial Sequence
  Description of Artificial Sequence: Synthetic epitope
TSQTIKVSPD

SEQ ID NO: 52092 - protein, 10 aa, Artificial Sequence
  Description of Artificial Sequence: Synthetic epitope
TSQTQATLQQ

SEQ ID NO: 52093 - protein, 10 aa, Artificial Sequence
  Description of Artificial Sequence: Synthetic epitope
TSQVENISNT

SEQ ID NO: 52094 - protein, 10 aa, Artificial Sequence
  Description of Artificial Sequence: Synthetic epitope
TSRDHSSQSE

SEQ ID NO: 52095 - protein, 10 aa, Artificial Sequence
  Description of Artificial Sequence: Synthetic epitope
TSRDKAVKPA

SEQ ID NO: 52096 - protein, 10 aa, Artificial Sequence
  Description of Artificial Sequence: Synthetic epitope
TSRELAGLHH

SEQ ID NO: 52097 - protein, 10 aa, Artificial Sequence
  Description of Artificial Sequence: Synthetic epitope
TSRFELATRT

SEQ ID NO: 52098 - protein, 10 aa, Artificial Sequence
  Description of Artificial Sequence: Synthetic epitope
TSRGLQLGQT

SEQ ID NO: 52099 - protein, 10 aa, Artificial Sequence
  Description of Artificial Sequence: Synthetic epitope
TSRITELKEE

SEQ ID NO: 52100 - protein, 10 aa, Artificial Sequence
  Description of Artificial Sequence: Synthetic epitope
TSRLQAAKEQ

SEQ ID NO: 52101 - protein, 10 aa, Artificial Sequence
  Description of Artificial Sequence: Synthetic epitope
TSRNVKSLEK

SEQ ID NO: 52102 - protein, 10 aa, Artificial Sequence
  Description of Artificial Sequence: Synthetic epitope
TSRPSKEADN

SEQ ID NO: 52103 - protein, 10 aa, Artificial Sequence
  Description of Artificial Sequence: Synthetic epitope
TSRQAALGTS

SEQ ID NO: 52104 - protein, 10 aa, Artificial Sequence
  Description of Artificial Sequence: Synthetic epitope
TSRQKTSGPS

SEQ ID NO: 52105 - protein, 10 aa, Artificial Sequence
  Description of Artificial Sequence: Synthetic epitope
TSRSGTDVDA

SEQ ID NO: 52106 - protein, 10 aa, Artificial Sequence
  Description of Artificial Sequence: Synthetic epitope
TSRSKSEVSP

SEQ ID NO: 52107 - protein, 10 aa, Artificial Sequence
  Description of Artificial Sequence: Synthetic epitope
TSRSSDAFTT

SEQ ID NO: 52108 - protein, 10 aa, Artificial Sequence
  Description of Artificial Sequence: Synthetic epitope
TSRTETLLSL

SEQ ID NO: 52109 - protein, 10 aa, Artificial Sequence
  Description of Artificial Sequence: Synthetic epitope
TSRTMSINAA

SEQ ID NO: 52110 - protein, 10 aa, Artificial Sequence
  Description of Artificial Sequence: Synthetic epitope
TSRVMEEKDE

SEQ ID NO: 52111 - protein, 10 aa, Artificial Sequence
  Description of Artificial Sequence: Synthetic epitope
TSRVTYKNVP

SEQ ID NO: 52112 - protein, 10 aa, Artificial Sequence
  Description of Artificial Sequence: Synthetic epitope
TSSAEDEVET

SEQ ID NO: 52113 - protein, 10 aa, Artificial Sequence
  Description of Artificial Sequence: Synthetic epitope
TSSASQLSPT

SEQ ID NO: 52114 - protein, 10 aa, Artificial Sequence
  Description of Artificial Sequence: Synthetic epitope
TSSASRLLTT

SEQ ID NO: 52115 - protein, 10 aa, Artificial Sequence
  Description of Artificial Sequence: Synthetic epitope
TSSASVSTVR

SEQ ID NO: 52116 - protein, 10 aa, Artificial Sequence
  Description of Artificial Sequence: Synthetic epitope
TSSATDGDEE

SEQ ID NO: 52117 - protein, 10 aa, Artificial Sequence
  Description of Artificial Sequence: Synthetic epitope
TSSATKSALP

SEQ ID NO: 52118 - protein, 10 aa, Artificial Sequence
  Description of Artificial Sequence: Synthetic epitope
TSSDDALDAP

SEQ ID NO: 52119 - protein, 10 aa, Artificial Sequence
  Description of Artificial Sequence: Synthetic epitope
TSSDLKTSVE

SEQ ID NO: 52120 - protein, 10 aa, Artificial Sequence
  Description of Artificial Sequence: Synthetic epitope
TSSDSGRSMK

SEQ ID NO: 52121 - protein, 10 aa, Artificial Sequence
  Description of Artificial Sequence: Synthetic epitope
TSSEATSSEG

SEQ ID NO: 52122 - protein, 10 aa, Artificial Sequence
  Description of Artificial Sequence: Synthetic epitope
TSSEGSNSAD

SEQ ID NO: 52123 - protein, 10 aa, Artificial Sequence
  Description of Artificial Sequence: Synthetic epitope
TSSEHTETKQ

SEQ ID NO: 52124 - protein, 10 aa, Artificial Sequence
  Description of Artificial Sequence: Synthetic epitope
TSSEKRSYSR

SEQ ID NO: 52125 - protein, 10 aa, Artificial Sequence
  Description of Artificial Sequence: Synthetic epitope
TSSELNSGQN

SEQ ID NO: 52126 - protein, 10 aa, Artificial Sequence
  Description of Artificial Sequence: Synthetic epitope
TSSERTSARG

SEQ ID NO: 52127 - protein, 10 aa, Artificial Sequence
  Description of Artificial Sequence: Synthetic epitope
TSSEVARTWV

SEQ ID NO: 52128 - protein, 10 aa, Artificial Sequence
  Description of Artificial Sequence: Synthetic epitope
TSSGATSSGG

SEQ ID NO: 52129 - protein, 10 aa, Artificial Sequence
  Description of Artificial Sequence: Synthetic epitope
TSSGAVVGAQ

SEQ ID NO: 52130 - protein, 10 aa, Artificial Sequence
  Description of Artificial Sequence: Synthetic epitope
TSSGSNSNAL

SEQ ID NO: 52131 - protein, 10 aa, Artificial Sequence
  Description of Artificial Sequence: Synthetic epitope
TSSGSNSNVL

SEQ ID NO: 52132 - protein, 10 aa, Artificial Sequence
  Description of Artificial Sequence: Synthetic epitope
TSSGTQSDDS

SEQ ID NO: 52133 - protein, 10 aa, Artificial Sequence
  Description of Artificial Sequence: Synthetic epitope
TSSHETQNRI

SEQ ID NO: 52134 - protein, 10 aa, Artificial Sequence
  Description of Artificial Sequence: Synthetic epitope
TSSHHSSKTI

SEQ ID NO: 52135 - protein, 10 aa, Artificial Sequence
  Description of Artificial Sequence: Synthetic epitope
TSSHSKIEDS

SEQ ID NO: 52136 - protein, 10 aa, Artificial Sequence
  Description of Artificial Sequence: Synthetic epitope
TSSIAAQTDA

SEQ ID NO: 52137 - protein, 10 aa, Artificial Sequence
  Description of Artificial Sequence: Synthetic epitope
TSSIEKLMEA

SEQ ID NO: 52138 - protein, 10 aa, Artificial Sequence
  Description of Artificial Sequence: Synthetic epitope
TSSIMKIEGK

SEQ ID NO: 52139 - protein, 10 aa, Artificial Sequence
  Description of Artificial Sequence: Synthetic epitope
TSSISTLTNM

SEQ ID NO: 52140 - protein, 10 aa, Artificial Sequence
  Description of Artificial Sequence: Synthetic epitope
TSSITSTNTV

SEQ ID NO: 52141 - protein, 10 aa, Artificial Sequence
  Description of Artificial Sequence: Synthetic epitope
TSSIVMEIQK

SEQ ID NO: 52142 - protein, 10 aa, Artificial Sequence
  Description of Artificial Sequence: Synthetic epitope
TSSKKTKTQE

SEQ ID NO: 52143 - protein, 10 aa, Artificial Sequence
  Description of Artificial Sequence: Synthetic epitope
TSSKLTKKES

SEQ ID NO: 52144 - protein, 10 aa, Artificial Sequence
  Description of Artificial Sequence: Synthetic epitope
TSSKVTRAQI

SEQ ID NO: 52145 - protein, 10 aa, Artificial Sequence
  Description of Artificial Sequence: Synthetic epitope
TSSLASAYAD

SEQ ID NO: 52146 - protein, 10 aa, Artificial Sequence
  Description of Artificial Sequence: Synthetic epitope
TSSLASHDST

SEQ ID NO: 52147 - protein, 10 aa, Artificial Sequence
  Description of Artificial Sequence: Synthetic epitope
TSSLDLDIQT

SEQ ID NO: 52148 - protein, 10 aa, Artificial Sequence
  Description of Artificial Sequence: Synthetic epitope
TSSLETITQQ

SEQ ID NO: 52149 - protein, 10 aa, Artificial Sequence
  Description of Artificial Sequence: Synthetic epitope
TSSLKKATMS

SEQ ID NO: 52150 - protein, 10 aa, Artificial Sequence
  Description of Artificial Sequence: Synthetic epitope
TSSLKLSLND

SEQ ID NO: 52151 - protein, 10 aa, Artificial Sequence
  Description of Artificial Sequence: Synthetic epitope
TSSLQSSDAV

SEQ ID NO: 52152 - protein, 10 aa, Artificial Sequence
  Description of Artificial Sequence: Synthetic epitope
TSSLRRETSD

SEQ ID NO: 52153 - protein, 10 aa, Artificial Sequence
  Description of Artificial Sequence: Synthetic epitope
TSSLSTINYD

SEQ ID NO: 52154 - protein, 10 aa, Artificial Sequence
  Description of Artificial Sequence: Synthetic epitope
TSSLSTRSLE

SEQ ID NO: 52155 - protein, 10 aa, Artificial Sequence
  Description of Artificial Sequence: Synthetic epitope
TSSLSTSTTL

SEQ ID NO: 52156 - protein, 10 aa, Artificial Sequence
  Description of Artificial Sequence: Synthetic epitope
TSSLVGVVQS

SEQ ID NO: 52157 - protein, 10 aa, Artificial Sequence
  Description of Artificial Sequence: Synthetic epitope
TSSLVQQVSS

SEQ ID NO: 52158 - protein, 10 aa, Artificial Sequence
  Description of Artificial Sequence: Synthetic epitope
TSSLVSMTSA

SEQ ID NO: 52159 - protein, 10 aa, Artificial Sequence
  Description of Artificial Sequence: Synthetic epitope
TSSNADKSLQ

SEQ ID NO: 52160 - protein, 10 aa, Artificial Sequence
  Description of Artificial Sequence: Synthetic epitope
TSSNSSDNAP

SEQ ID NO: 52161 - protein, 10 aa, Artificial Sequence
  Description of Artificial Sequence: Synthetic epitope
TSSNSSKGQL

SEQ ID NO: 52162 - protein, 10 aa, Artificial Sequence
  Description of Artificial Sequence: Synthetic epitope
TSSPIKTAVV

SEQ ID NO: 52163 - protein, 10 aa, Artificial Sequence
  Description of Artificial Sequence: Synthetic epitope
TSSQAMLAKG

SEQ ID NO: 52164 - protein, 10 aa, Artificial Sequence
  Description of Artificial Sequence: Synthetic epitope
TSSQASLARF

SEQ ID NO: 52165 - protein, 10 aa, Artificial Sequence
  Description of Artificial Sequence: Synthetic epitope
TSSQENYNST

SEQ ID NO: 52166 - protein, 10 aa, Artificial Sequence
  Description of Artificial Sequence: Synthetic epitope
TSSQKVSPIQ

SEQ ID NO: 52167 - protein, 10 aa, Artificial Sequence
  Description of Artificial Sequence: Synthetic epitope
TSSQPSTVSE

SEQ ID NO: 52168 - protein, 10 aa, Artificial Sequence
  Description of Artificial Sequence: Synthetic epitope
TSSQSEAADQ

SEQ ID NO: 52169 - protein, 10 aa, Artificial Sequence
  Description of Artificial Sequence: Synthetic epitope
TSSQSLRKLS

SEQ ID NO: 52170 - protein, 10 aa, Artificial Sequence
  Description of Artificial Sequence: Synthetic epitope
TSSQSQTSTA

SEQ ID NO: 52171 - protein, 10 aa, Artificial Sequence
  Description of Artificial Sequence: Synthetic epitope
TSSQSVQHEN

SEQ ID NO: 52172 - protein, 10 aa, Artificial Sequence
  Description of Artificial Sequence: Synthetic epitope
TSSQVMLSKG

SEQ ID NO: 52173 - protein, 10 aa, Artificial Sequence
  Description of Artificial Sequence: Synthetic epitope
TSSRFMQKFA

SEQ ID NO: 52174 - protein, 10 aa, Artificial Sequence
  Description of Artificial Sequence: Synthetic epitope
TSSTANDRIL

SEQ ID NO: 52175 - protein, 10 aa, Artificial Sequence
  Description of Artificial Sequence: Synthetic epitope
TSSTAQPRRE

SEQ ID NO: 52176 - protein, 10 aa, Artificial Sequence
  Description of Artificial Sequence: Synthetic epitope
TSSTASGDDE

SEQ ID NO: 52177 - protein, 10 aa, Artificial Sequence
  Description of Artificial Sequence: Synthetic epitope
TSSTASPSTD

SEQ ID NO: 52178 - protein, 10 aa, Artificial Sequence
  Description of Artificial Sequence: Synthetic epitope
TSSTATAQTV

SEQ ID NO: 52179 - protein, 10 aa, Artificial Sequence
  Description of Artificial Sequence: Synthetic epitope
TSSTERFSQN

SEQ ID NO: 52180 - protein, 10 aa, Artificial Sequence
  Description of Artificial Sequence: Synthetic epitope
TSSTEVNSQA

SEQ ID NO: 52181 - protein, 10 aa, Artificial Sequence
  Description of Artificial Sequence: Synthetic epitope
TSSTLDSEGT

SEQ ID NO: 52182 - protein, 10 aa, Artificial Sequence
  Description of Artificial Sequence: Synthetic epitope
TSSTPNSNST

SEQ ID NO: 52183 - protein, 10 aa, Artificial Sequence
  Description of Artificial Sequence: Synthetic epitope
TSSTSLSKGA

SEQ ID NO: 52184 - protein, 10 aa, Artificial Sequence
  Description of Artificial Sequence: Synthetic epitope
TSSTSNSGNE

SEQ ID NO: 52185 - protein, 10 aa, Artificial Sequence
  Description of Artificial Sequence: Synthetic epitope
TSSTSSTKRL

SEQ ID NO: 52186 - protein, 10 aa, Artificial Sequence
  Description of Artificial Sequence: Synthetic epitope
TSSTTSTISP

SEQ ID NO: 52187 - protein, 10 aa, Artificial Sequence
  Description of Artificial Sequence: Synthetic epitope
TSSVGTQTEH

SEQ ID NO: 52188 - protein, 10 aa, Artificial Sequence
  Description of Artificial Sequence: Synthetic epitope
TSSVKSISDV

SEQ ID NO: 52189 - protein, 10 aa, Artificial Sequence
  Description of Artificial Sequence: Synthetic epitope
TSSVQEFPQL

SEQ ID NO: 52190 - protein, 10 aa, Artificial Sequence
  Description of Artificial Sequence: Synthetic epitope
TSSVSSALAN

SEQ ID NO: 52191 - protein, 10 aa, Artificial Sequence
  Description of Artificial Sequence: Synthetic epitope
TSSVSSTAGE

SEQ ID NO: 52192 - protein, 10 aa, Artificial Sequence
  Description of Artificial Sequence: Synthetic epitope
TSSVSTLKAE

SEQ ID NO: 52193 - protein, 10 aa, Artificial Sequence
  Description of Artificial Sequence: Synthetic epitope
TSSWDSVIQN

SEQ ID NO: 52194 - protein, 10 aa, Artificial Sequence
  Description of Artificial Sequence: Synthetic epitope
TSSYASQQSK

SEQ ID NO: 52195 - protein, 10 aa, Artificial Sequence
  Description of Artificial Sequence: Synthetic epitope
TSSYKRAPAS

SEQ ID NO: 52196 - protein, 10 aa, Artificial Sequence
  Description of Artificial Sequence: Synthetic epitope
TSTAGSSRSP

SEQ ID NO: 52197 - protein, 10 aa, Artificial Sequence
  Description of Artificial Sequence: Synthetic epitope
TSTDQQTVSS

SEQ ID NO: 52198 - protein, 10 aa, Artificial Sequence
  Description of Artificial Sequence: Synthetic epitope
TSTDQQTVSS

SEQ ID NO: 52199 - protein, 10 aa, Artificial Sequence
  Description of Artificial Sequence: Synthetic epitope
TSTDSVSKEG

SEQ ID NO: 52200 - protein, 10 aa, Artificial Sequence
  Description of Artificial Sequence: Synthetic epitope
TSTEKSREED

SEQ ID NO: 52201 - protein, 10 aa, Artificial Sequence
  Description of Artificial Sequence: Synthetic epitope
TSTELNTPST

SEQ ID NO: 52202 - protein, 10 aa, Artificial Sequence
  Description of Artificial Sequence: Synthetic epitope
TSTEMTEKSI

SEQ ID NO: 52203 - protein, 10 aa, Artificial Sequence
  Description of Artificial Sequence: Synthetic epitope
TSTENESDTQ

SEQ ID NO: 52204 - protein, 10 aa, Artificial Sequence
  Description of Artificial Sequence: Synthetic epitope
TSTFKVTRDS

SEQ ID NO: 52205 - protein, 10 aa, Artificial Sequence
  Description of Artificial Sequence: Synthetic epitope
TSTGDQALEV

SEQ ID NO: 52206 - protein, 10 aa, Artificial Sequence
  Description of Artificial Sequence: Synthetic epitope
TSTGSAASSG

SEQ ID NO: 52207 - protein, 10 aa, Artificial Sequence
  Description of Artificial Sequence: Synthetic epitope
TSTHESEHQS

SEQ ID NO: 52208 - protein, 10 aa, Artificial Sequence
  Description of Artificial Sequence: Synthetic epitope
TSTIDDSKDD

SEQ ID NO: 52209 - protein, 10 aa, Artificial Sequence
  Description of Artificial Sequence: Synthetic epitope
TSTIKNEVDS

SEQ ID NO: 52210 - protein, 10 aa, Artificial Sequence
  Description of Artificial Sequence: Synthetic epitope
TSTINSIKKV

SEQ ID NO: 52211 - protein, 10 aa, Artificial Sequence
  Description of Artificial Sequence: Synthetic epitope
TSTITRHTVD

SEQ ID NO: 52212 - protein, 10 aa, Artificial Sequence
  Description of Artificial Sequence: Synthetic epitope
TSTKAGSFSI

SEQ ID NO: 52213 - protein, 10 aa, Artificial Sequence
  Description of Artificial Sequence: Synthetic epitope
TSTKEGESGE

SEQ ID NO: 52214 - protein, 10 aa, Artificial Sequence
  Description of Artificial Sequence: Synthetic epitope
TSTKRAAVYR

SEQ ID NO: 52215 - protein, 10 aa, Artificial Sequence
  Description of Artificial Sequence: Synthetic epitope
TSTKSKSSAE

SEQ ID NO: 52216 - protein, 10 aa, Artificial Sequence
  Description of Artificial Sequence: Synthetic epitope
TSTKSSVTGK

SEQ ID NO: 52217 - protein, 10 aa, Artificial Sequence
  Description of Artificial Sequence: Synthetic epitope
TSTLADVKHT

SEQ ID NO: 52218 - protein, 10 aa, Artificial Sequence
  Description of Artificial Sequence: Synthetic epitope
TSTLELKIHG

SEQ ID NO: 52219 - protein, 10 aa, Artificial Sequence
  Description of Artificial Sequence: Synthetic epitope
TSTLNSLSQA

SEQ ID NO: 52220 - protein, 10 aa, Artificial Sequence
  Description of Artificial Sequence: Synthetic epitope
TSTLQDTSRN

SEQ ID NO: 52221 - protein, 10 aa, Artificial Sequence
  Description of Artificial Sequence: Synthetic epitope
TSTMKTGPLI

SEQ ID NO: 52222 - protein, 10 aa, Artificial Sequence
  Description of Artificial Sequence: Synthetic epitope
TSTMNTLKRK

SEQ ID NO: 52223 - protein, 10 aa, Artificial Sequence
  Description of Artificial Sequence: Synthetic epitope
TSTMRAAMKP

SEQ ID NO: 52224 - protein, 10 aa, Artificial Sequence
  Description of Artificial Sequence: Synthetic epitope
TSTNLSLSNK

SEQ ID NO: 52225 - protein, 10 aa, Artificial Sequence
  Description of Artificial Sequence: Synthetic epitope
TSTNVVEPRM

SEQ ID NO: 52226 - protein, 10 aa, Artificial Sequence
  Description of Artificial Sequence: Synthetic epitope
TSTPAAVPVQ

SEQ ID NO: 52227 - protein, 10 aa, Artificial Sequence
  Description of Artificial Sequence: Synthetic epitope
TSTPKSESIQ

SEQ ID NO: 52228 - protein, 10 aa, Artificial Sequence
  Description of Artificial Sequence: Synthetic epitope
TSTQAKMVSK

SEQ ID NO: 52229 - protein, 10 aa, Artificial Sequence
  Description of Artificial Sequence: Synthetic epitope
TSTQLAASDG

SEQ ID NO: 52230 - protein, 10 aa, Artificial Sequence
  Description of Artificial Sequence: Synthetic epitope
TSTQSTATVN

SEQ ID NO: 52231 - protein, 10 aa, Artificial Sequence
  Description of Artificial Sequence: Synthetic epitope
TSTQTKIRPN

SEQ ID NO: 52232 - protein, 10 aa, Artificial Sequence
  Description of Artificial Sequence: Synthetic epitope
TSTSDLVEVP

SEQ ID NO: 52233 - protein, 10 aa, Artificial Sequence
  Description of Artificial Sequence: Synthetic epitope
TSTSEFTTES

SEQ ID NO: 52234 - protein, 10 aa, Artificial Sequence
  Description of Artificial Sequence: Synthetic epitope
TSTSISAGTT

SEQ ID NO: 52235 - protein, 10 aa, Artificial Sequence
  Description of Artificial Sequence: Synthetic epitope
TSTSKSESNE

SEQ ID NO: 52236 - protein, 10 aa, Artificial Sequence
  Description of Artificial Sequence: Synthetic epitope
TSTSNESGDQ

SEQ ID NO: 52237 - protein, 10 aa, Artificial Sequence
  Description of Artificial Sequence: Synthetic epitope
TSTSNQQKEK

SEQ ID NO: 52238 - protein, 10 aa, Artificial Sequence
  Description of Artificial Sequence: Synthetic epitope
TSTSQSSIKV

SEQ ID NO: 52239 - protein, 10 aa, Artificial Sequence
  Description of Artificial Sequence: Synthetic epitope
TSTSRSRQLS

SEQ ID NO: 52240 - protein, 10 aa, Artificial Sequence
  Description of Artificial Sequence: Synthetic epitope
TSTSSASTGH

SEQ ID NO: 52241 - protein, 10 aa, Artificial Sequence
  Description of Artificial Sequence: Synthetic epitope
TSTSTEAATA

SEQ ID NO: 52242 - protein, 10 aa, Artificial Sequence
  Description of Artificial Sequence: Synthetic epitope
TSTTETDIFE

SEQ ID NO: 52243 - protein, 10 aa, Artificial Sequence
  Description of Artificial Sequence: Synthetic epitope
TSTTSTLVPG

SEQ ID NO: 52244 - protein, 10 aa, Artificial Sequence
  Description of Artificial Sequence: Synthetic epitope
TSTVGDKKTD

SEQ ID NO: 52245 - protein, 10 aa, Artificial Sequence
  Description of Artificial Sequence: Synthetic epitope
TSTVKKVYRP

SEQ ID NO: 52246 - protein, 10 aa, Artificial Sequence
  Description of Artificial Sequence: Synthetic epitope
TSTVREKKAV

SEQ ID NO: 52247 - protein, 10 aa, Artificial Sequence
  Description of Artificial Sequence: Synthetic epitope
TSTYRQNQTK

SEQ ID NO: 52248 - protein, 10 aa, Artificial Sequence
  Description of Artificial Sequence: Synthetic epitope
TSTYSSKLMD

SEQ ID NO: 52249 - protein, 10 aa, Artificial Sequence
  Description of Artificial Sequence: Synthetic epitope
TSVAEATEVD

SEQ ID NO: 52250 - protein, 10 aa, Artificial Sequence
  Description of Artificial Sequence: Synthetic epitope
TSVAGATEKA

SEQ ID NO: 52251 - protein, 10 aa, Artificial Sequence
  Description of Artificial Sequence: Synthetic epitope
TSVAKDKSST

SEQ ID NO: 52252 - protein, 10 aa, Artificial Sequence
  Description of Artificial Sequence: Synthetic epitope
TSVASSEGSE

SEQ ID NO: 52253 - protein, 10 aa, Artificial Sequence
  Description of Artificial Sequence: Synthetic epitope
TSVATESSES

SEQ ID NO: 52254 - protein, 10 aa, Artificial Sequence
  Description of Artificial Sequence: Synthetic epitope
TSVDGSDSSL

SEQ ID NO: 52255 - protein, 10 aa, Artificial Sequence
  Description of Artificial Sequence: Synthetic epitope
TSVEVTGGLF

SEQ ID NO: 52256 - protein, 10 aa, Artificial Sequence
  Description of Artificial Sequence: Synthetic epitope
TSVISEQSEQ

SEQ ID NO: 52257 - protein, 10 aa, Artificial Sequence
  Description of Artificial Sequence: Synthetic epitope
TSVKAALLRA

SEQ ID NO: 52258 - protein, 10 aa, Artificial Sequence
  Description of Artificial Sequence: Synthetic epitope
TSVKFNAPSL

SEQ ID NO: 52259 - protein, 10 aa, Artificial Sequence
  Description of Artificial Sequence: Synthetic epitope
TSVLDILAKN

SEQ ID NO: 52260 - protein, 10 aa, Artificial Sequence
  Description of Artificial Sequence: Synthetic epitope
TSVNQTSQSY

SEQ ID NO: 52261 - protein, 10 aa, Artificial Sequence
  Description of Artificial Sequence: Synthetic epitope
TSVPPKERES

SEQ ID NO: 52262 - protein, 10 aa, Artificial Sequence
  Description of Artificial Sequence: Synthetic epitope
TSVPTLESAA

SEQ ID NO: 52263 - protein, 10 aa, Artificial Sequence
  Description of Artificial Sequence: Synthetic epitope
TSVQKTVAPQ

SEQ ID NO: 52264 - protein, 10 aa, Artificial Sequence
  Description of Artificial Sequence: Synthetic epitope
TSVRDSADVD

SEQ ID NO: 52265 - protein, 10 aa, Artificial Sequence
  Description of Artificial Sequence: Synthetic epitope
TSVRSRTRSS

SEQ ID NO: 52266 - protein, 10 aa, Artificial Sequence
  Description of Artificial Sequence: Synthetic epitope
TSVSNKSQAK

SEQ ID NO: 52267 - protein, 10 aa, Artificial Sequence
  Description of Artificial Sequence: Synthetic epitope
TSVSQNVIPS

SEQ ID NO: 52268 - protein, 10 aa, Artificial Sequence
  Description of Artificial Sequence: Synthetic epitope
TSVSREQIVG

SEQ ID NO: 52269 - protein, 10 aa, Artificial Sequence
  Description of Artificial Sequence: Synthetic epitope
TSVSSQNAIQ

SEQ ID NO: 52270 - protein, 10 aa, Artificial Sequence
  Description of Artificial Sequence: Synthetic epitope
TSVSSTTPDS

SEQ ID NO: 52271 - protein, 10 aa, Artificial Sequence
  Description of Artificial Sequence: Synthetic epitope
TSVTKNRADK

SEQ ID NO: 52272 - protein, 10 aa, Artificial Sequence
  Description of Artificial Sequence: Synthetic epitope
TSVTSVNQAS

SEQ ID NO: 52273 - protein, 10 aa, Artificial Sequence
  Description of Artificial Sequence: Synthetic epitope
TSVTTEETKP

SEQ ID NO: 52274 - protein, 10 aa, Artificial Sequence
  Description of Artificial Sequence: Synthetic epitope
TSVVQEESSA

SEQ ID NO: 52275 - protein, 10 aa, Artificial Sequence
  Description of Artificial Sequence: Synthetic epitope
TSVVTLVKPH

SEQ ID NO: 52276 - protein, 10 aa, Artificial Sequence
  Description of Artificial Sequence: Synthetic epitope
TSWISESQVS

SEQ ID NO: 52277 - protein, 10 aa, Artificial Sequence
  Description of Artificial Sequence: Synthetic epitope
TSYLTEIFKS

SEQ ID NO: 52278 - protein, 10 aa, Artificial Sequence
  Description of Artificial Sequence: Synthetic epitope
TSYQFAKEIA

SEQ ID NO: 52279 - protein, 10 aa, Artificial Sequence
  Description of Artificial Sequence: Synthetic epitope
TTAAGTSATA

SEQ ID NO: 52280 - protein, 10 aa, Artificial Sequence
  Description of Artificial Sequence: Synthetic epitope
TTAATDKPFK

SEQ ID NO: 52281 - protein, 10 aa, Artificial Sequence
  Description of Artificial Sequence: Synthetic epitope
TTADQGAAKP

SEQ ID NO: 52282 - protein, 10 aa, Artificial Sequence
  Description of Artificial Sequence: Synthetic epitope
TTAESQTTGK

SEQ ID NO: 52283 - protein, 10 aa, Artificial Sequence
  Description of Artificial Sequence: Synthetic epitope
TTAFSTSQNG

SEQ ID NO: 52284 - protein, 10 aa, Artificial Sequence
  Description of Artificial Sequence: Synthetic epitope
TTAFVMAASL

SEQ ID NO: 52285 - protein, 10 aa, Artificial Sequence
  Description of Artificial Sequence: Synthetic epitope
TTAHSWQRSR

SEQ ID NO: 52286 - protein, 10 aa, Artificial Sequence
  Description of Artificial Sequence: Synthetic epitope
TTAIVEVKGT

SEQ ID NO: 52287 - protein, 10 aa, Artificial Sequence
  Description of Artificial Sequence: Synthetic epitope
TTAKADAASS

SEQ ID NO: 52288 - protein, 10 aa, Artificial Sequence
  Description of Artificial Sequence: Synthetic epitope
TTAKEQSIVE

SEQ ID NO: 52289 - protein, 10 aa, Artificial Sequence
  Description of Artificial Sequence: Synthetic epitope
TTALEAIKNE

SEQ ID NO: 52290 - protein, 10 aa, Artificial Sequence
  Description of Artificial Sequence: Synthetic epitope
TTALSTVSSG

SEQ ID NO: 52291 - protein, 10 aa, Artificial Sequence
  Description of Artificial Sequence: Synthetic epitope
TTAPSSTASD

SEQ ID NO: 52292 - protein, 10 aa, Artificial Sequence
  Description of Artificial Sequence: Synthetic epitope
TTAPTMSASS

SEQ ID NO: 52293 - protein, 10 aa, Artificial Sequence
  Description of Artificial Sequence: Synthetic epitope
TTAQVEPSVT

SEQ ID NO: 52294 - protein, 10 aa, Artificial Sequence
  Description of Artificial Sequence: Synthetic epitope
TTARLASART

SEQ ID NO: 52295 - protein, 10 aa, Artificial Sequence
  Description of Artificial Sequence: Synthetic epitope
TTARVITNQY

SEQ ID NO: 52296 - protein, 10 aa, Artificial Sequence
  Description of Artificial Sequence: Synthetic epitope
TTASESRGWD

SEQ ID NO: 52297 - protein, 10 aa, Artificial Sequence
  Description of Artificial Sequence: Synthetic epitope
TTASLAFTAA

SEQ ID NO: 52298 - protein, 10 aa, Artificial Sequence
  Description of Artificial Sequence: Synthetic epitope
TTASTVGNSS

SEQ ID NO: 52299 - protein, 10 aa, Artificial Sequence
  Description of Artificial Sequence: Synthetic epitope
TTASVSATAA

SEQ ID NO: 52300 - protein, 10 aa, Artificial Sequence
  Description of Artificial Sequence: Synthetic epitope
TTATAASNLI

SEQ ID NO: 52301 - protein, 10 aa, Artificial Sequence
  Description of Artificial Sequence: Synthetic epitope
TTATSLYSSD

SEQ ID NO: 52302 - protein, 10 aa, Artificial Sequence
  Description of Artificial Sequence: Synthetic epitope
TTATTSSKRI

SEQ ID NO: 52303 - protein, 10 aa, Artificial Sequence
  Description of Artificial Sequence: Synthetic epitope
TTAVLVFDER

SEQ ID NO: 52304 - protein, 10 aa, Artificial Sequence
  Description of Artificial Sequence: Synthetic epitope
TTAVSSVLLA

SEQ ID NO: 52305 - protein, 10 aa, Artificial Sequence
  Description of Artificial Sequence: Synthetic epitope
TTDADKIEDE

SEQ ID NO: 52306 - protein, 10 aa, Artificial Sequence
  Description of Artificial Sequence: Synthetic epitope
TTDDARPLSR

SEQ ID NO: 52307 - protein, 10 aa, Artificial Sequence
  Description of Artificial Sequence: Synthetic epitope
TTDDNFMPKR

SEQ ID NO: 52308 - protein, 10 aa, Artificial Sequence
  Description of Artificial Sequence: Synthetic epitope
TTDEQQIINS

SEQ ID NO: 52309 - protein, 10 aa, Artificial Sequence
  Description of Artificial Sequence: Synthetic epitope
TTDEVTLQVS

SEQ ID NO: 52310 - protein, 10 aa, Artificial Sequence
  Description of Artificial Sequence: Synthetic epitope
TTDFQIQTEM

SEQ ID NO: 52311 - protein, 10 aa, Artificial Sequence
  Description of Artificial Sequence: Synthetic epitope
TTDILELLSA

SEQ ID NO: 52312 - protein, 10 aa, Artificial Sequence
  Description of Artificial Sequence: Synthetic epitope
TTDKDVLISE

SEQ ID NO: 52313 - protein, 10 aa, Artificial Sequence
  Description of Artificial Sequence: Synthetic epitope
TTDKQSSKEN

SEQ ID NO: 52314 - protein, 10 aa, Artificial Sequence
  Description of Artificial Sequence: Synthetic epitope
TTDNEASPSS

SEQ ID NO: 52315 - protein, 10 aa, Artificial Sequence
  Description of Artificial Sequence: Synthetic epitope
TTDPSQSAQN

SEQ ID NO: 52316 - protein, 10 aa, Artificial Sequence
  Description of Artificial Sequence: Synthetic epitope
TTDQDQKIKK

SEQ ID NO: 52317 - protein, 10 aa, Artificial Sequence
  Description of Artificial Sequence: Synthetic epitope
TTDQSLQAGG

SEQ ID NO: 52318 - protein, 10 aa, Artificial Sequence
  Description of Artificial Sequence: Synthetic epitope
TTDRAARKEH

SEQ ID NO: 52319 - protein, 10 aa, Artificial Sequence
  Description of Artificial Sequence: Synthetic epitope
TTDRKSSKKH

SEQ ID NO: 52320 - protein, 10 aa, Artificial Sequence
  Description of Artificial Sequence: Synthetic epitope
TTDRSLEKAM

SEQ ID NO: 52321 - protein, 10 aa, Artificial Sequence
  Description of Artificial Sequence: Synthetic epitope
TTDSSNKTAP

SEQ ID NO: 52322 - protein, 10 aa, Artificial Sequence
  Description of Artificial Sequence: Synthetic epitope
TTDTMTSPEH

SEQ ID NO: 52323 - protein, 10 aa, Artificial Sequence
  Description of Artificial Sequence: Synthetic epitope
TTEAMIEVNI

SEQ ID NO: 52324 - protein, 10 aa, Artificial Sequence
  Description of Artificial Sequence: Synthetic epitope
TTEAQKKAAP

SEQ ID NO: 52325 - protein, 10 aa, Artificial Sequence
  Description of Artificial Sequence: Synthetic epitope
TTEDREMRKK

SEQ ID NO: 52326 - protein, 10 aa, Artificial Sequence
  Description of Artificial Sequence: Synthetic epitope
TTEELTVIKS

SEQ ID NO: 52327 - protein, 10 aa, Artificial Sequence
  Description of Artificial Sequence: Synthetic epitope
TTEEMKQEEN

SEQ ID NO: 52328 - protein, 10 aa, Artificial Sequence
  Description of Artificial Sequence: Synthetic epitope
TTEENLLQEE

SEQ ID NO: 52329 - protein, 10 aa, Artificial Sequence
  Description of Artificial Sequence: Synthetic epitope
TTEEQTRQER

SEQ ID NO: 52330 - protein, 10 aa, Artificial Sequence
  Description of Artificial Sequence: Synthetic epitope
TTEEVINEGL

SEQ ID NO: 52331 - protein, 10 aa, Artificial Sequence
  Description of Artificial Sequence: Synthetic epitope
TTEFEMAGNR

SEQ ID NO: 52332 - protein, 10 aa, Artificial Sequence
  Description of Artificial Sequence: Synthetic epitope
TTEGITSDSL

SEQ ID NO: 52333 - protein, 10 aa, Artificial Sequence
  Description of Artificial Sequence: Synthetic epitope
TTEKEKSYTG

SEQ ID NO: 52334 - protein, 10 aa, Artificial Sequence
  Description of Artificial Sequence: Synthetic epitope
TTEKNSETSS

SEQ ID NO: 52335 - protein, 10 aa, Artificial Sequence
  Description of Artificial Sequence: Synthetic epitope
TTEKQSQPTL

SEQ ID NO: 52336 - protein, 10 aa, Artificial Sequence
  Description of Artificial Sequence: Synthetic epitope
TTENTAKRGQ

SEQ ID NO: 52337 - protein, 10 aa, Artificial Sequence
  Description of Artificial Sequence: Synthetic epitope
TTEQALTYPE

SEQ ID NO: 52338 - protein, 10 aa, Artificial Sequence
  Description of Artificial Sequence: Synthetic epitope
TTESIMKKSE

SEQ ID NO: 52339 - protein, 10 aa, Artificial Sequence
  Description of Artificial Sequence: Synthetic epitope
TTESSKSTNS

SEQ ID NO: 52340 - protein, 10 aa, Artificial Sequence
  Description of Artificial Sequence: Synthetic epitope
TTESVPLKNT

SEQ ID NO: 52341 - protein, 10 aa, Artificial Sequence
  Description of Artificial Sequence: Synthetic epitope
TTETFETGVP

SEQ ID NO: 52342 - protein, 10 aa, Artificial Sequence
  Description of Artificial Sequence: Synthetic epitope
TTEVITARRP

SEQ ID NO: 52343 - protein, 10 aa, Artificial Sequence
  Description of Artificial Sequence: Synthetic epitope
TTEVVTEVEL

SEQ ID NO: 52344 - protein, 10 aa, Artificial Sequence
  Description of Artificial Sequence: Synthetic epitope
TTFDSIVGTN

SEQ ID NO: 52345 - protein, 10 aa, Artificial Sequence
  Description of Artificial Sequence: Synthetic epitope
TTFMAKLGQK

SEQ ID NO: 52346 - protein, 10 aa, Artificial Sequence
  Description of Artificial Sequence: Synthetic epitope
TTFPMSNHTR

SEQ ID NO: 52347 - protein, 10 aa, Artificial Sequence
  Description of Artificial Sequence: Synthetic epitope
TTFSLASLRE

SEQ ID NO: 52348 - protein, 10 aa, Artificial Sequence
  Description of Artificial Sequence: Synthetic epitope
TTFSNQAESM

SEQ ID NO: 52349 - protein, 10 aa, Artificial Sequence
  Description of Artificial Sequence: Synthetic epitope
TTFTKALQDS

SEQ ID NO: 52350 - protein, 10 aa, Artificial Sequence
  Description of Artificial Sequence: Synthetic epitope
TTFTLQDVSN

SEQ ID NO: 52351 - protein, 10 aa, Artificial Sequence
  Description of Artificial Sequence: Synthetic epitope
TTFYNAVQEQ

SEQ ID NO: 52352 - protein, 10 aa, Artificial Sequence
  Description of Artificial Sequence: Synthetic epitope
TTGAAKRSTL

SEQ ID NO: 52353 - protein, 10 aa, Artificial Sequence
  Description of Artificial Sequence: Synthetic epitope
TTGAGSAKQS

SEQ ID NO: 52354 - protein, 10 aa, Artificial Sequence
  Description of Artificial Sequence: Synthetic epitope
TTGDAMSKRS

SEQ ID NO: 52355 - protein, 10 aa, Artificial Sequence
  Description of Artificial Sequence: Synthetic epitope
TTGEEGSVHS

SEQ ID NO: 52356 - protein, 10 aa, Artificial Sequence
  Description of Artificial Sequence: Synthetic epitope
TTGEFIHEKF

SEQ ID NO: 52357 - protein, 10 aa, Artificial Sequence
  Description of Artificial Sequence: Synthetic epitope
TTGKQRLIKR

SEQ ID NO: 52358 - protein, 10 aa, Artificial Sequence
  Description of Artificial Sequence: Synthetic epitope
TTGLERSAST

SEQ ID NO: 52359 - protein, 10 aa, Artificial Sequence
  Description of Artificial Sequence: Synthetic epitope
TTGNSSLNST

SEQ ID NO: 52360 - protein, 10 aa, Artificial Sequence
  Description of Artificial Sequence: Synthetic epitope
TTGQVTSPVK

SEQ ID NO: 52361 - protein, 10 aa, Artificial Sequence
  Description of Artificial Sequence: Synthetic epitope
TTGSAHALTA

SEQ ID NO: 52362 - protein, 10 aa, Artificial Sequence
  Description of Artificial Sequence: Synthetic epitope
TTGVTVRTSA

SEQ ID NO: 52363 - protein, 10 aa, Artificial Sequence
  Description of Artificial Sequence: Synthetic epitope
TTHGASIFTE

SEQ ID NO: 52364 - protein, 10 aa, Artificial Sequence
  Description of Artificial Sequence: Synthetic epitope
TTHSKNASHR

SEQ ID NO: 52365 - protein, 10 aa, Artificial Sequence
  Description of Artificial Sequence: Synthetic epitope
TTIASLVNLK

SEQ ID NO: 52366 - protein, 10 aa, Artificial Sequence
  Description of Artificial Sequence: Synthetic epitope
TTIATTPSKP

SEQ ID NO: 52367 - protein, 10 aa, Artificial Sequence
  Description of Artificial Sequence: Synthetic epitope
TTIGISATSA

SEQ ID NO: 52368 - protein, 10 aa, Artificial Sequence
  Description of Artificial Sequence: Synthetic epitope
TTIQTSDQEF

SEQ ID NO: 52369 - protein, 10 aa, Artificial Sequence
  Description of Artificial Sequence: Synthetic epitope
TTISDILESE

SEQ ID NO: 52370 - protein, 10 aa, Artificial Sequence
  Description of Artificial Sequence: Synthetic epitope
TTISKVSQVR

SEQ ID NO: 52371 - protein, 10 aa, Artificial Sequence
  Description of Artificial Sequence: Synthetic epitope
TTISRAKPVW

SEQ ID NO: 52372 - protein, 10 aa, Artificial Sequence
  Description of Artificial Sequence: Synthetic epitope
TTKAATAESQ

SEQ ID NO: 52373 - protein, 10 aa, Artificial Sequence
  Description of Artificial Sequence: Synthetic epitope
TTKAFAEPSL

SEQ ID NO: 52374 - protein, 10 aa, Artificial Sequence
  Description of Artificial Sequence: Synthetic epitope
TTKAKYKTPT

SEQ ID NO: 52375 - protein, 10 aa, Artificial Sequence
  Description of Artificial Sequence: Synthetic epitope
TTKALSEDSV

SEQ ID NO: 52376 - protein, 10 aa, Artificial Sequence
  Description of Artificial Sequence: Synthetic epitope
TTKDLKEKKE

SEQ ID NO: 52377 - protein, 10 aa, Artificial Sequence
  Description of Artificial Sequence: Synthetic epitope
TTKDSTTLAR

SEQ ID NO: 52378 - protein, 10 aa, Artificial Sequence
  Description of Artificial Sequence: Synthetic epitope
TTKEEITKDA

SEQ ID NO: 52379 - protein, 10 aa, Artificial Sequence
  Description of Artificial Sequence: Synthetic epitope
TTKGLIARKE

SEQ ID NO: 52380 - protein, 10 aa, Artificial Sequence
  Description of Artificial Sequence: Synthetic epitope
TTKGTSTELA

SEQ ID NO: 52381 - protein, 10 aa, Artificial Sequence
  Description of Artificial Sequence: Synthetic epitope
TTKIFSSKST

SEQ ID NO: 52382 - protein, 10 aa, Artificial Sequence
  Description of Artificial Sequence: Synthetic epitope
TTKIKGLEGE

SEQ ID NO: 52383 - protein, 10 aa, Artificial Sequence
  Description of Artificial Sequence: Synthetic epitope
TTKKIVLRLE

SEQ ID NO: 52384 - protein, 10 aa, Artificial Sequence
  Description of Artificial Sequence: Synthetic epitope
TTKKIVLRLE

SEQ ID NO: 52385 - protein, 10 aa, Artificial Sequence
  Description of Artificial Sequence: Synthetic epitope
TTKKRVSRRS

SEQ ID NO: 52386 - protein, 10 aa, Artificial Sequence
  Description of Artificial Sequence: Synthetic epitope
TTKNSSNKPA

SEQ ID NO: 52387 - protein, 10 aa, Artificial Sequence
  Description of Artificial Sequence: Synthetic epitope
TTKQHQSLQI

SEQ ID NO: 52388 - protein, 10 aa, Artificial Sequence
  Description of Artificial Sequence: Synthetic epitope
TTKSFRPFVP

SEQ ID NO: 52389 - protein, 10 aa, Artificial Sequence
  Description of Artificial Sequence: Synthetic epitope
TTKSKKDTFV

SEQ ID NO: 52390 - protein, 10 aa, Artificial Sequence
  Description of Artificial Sequence: Synthetic epitope
TTKSNIHSSV

SEQ ID NO: 52391 - protein, 10 aa, Artificial Sequence
  Description of Artificial Sequence: Synthetic epitope
TTKSPVMKKP

SEQ ID NO: 52392 - protein, 10 aa, Artificial Sequence
  Description of Artificial Sequence: Synthetic epitope
TTKSVIPVKP

SEQ ID NO: 52393 - protein, 10 aa, Artificial Sequence
  Description of Artificial Sequence: Synthetic epitope
TTKTKMQSKI

SEQ ID NO: 52394 - protein, 10 aa, Artificial Sequence
  Description of Artificial Sequence: Synthetic epitope
TTKTPSAVQT

SEQ ID NO: 52395 - protein, 10 aa, Artificial Sequence
  Description of Artificial Sequence: Synthetic epitope
TTKYRNPSLK

SEQ ID NO: 52396 - protein, 10 aa, Artificial Sequence
  Description of Artificial Sequence: Synthetic epitope
TTLAKIFGLF

SEQ ID NO: 52397 - protein, 10 aa, Artificial Sequence
  Description of Artificial Sequence: Synthetic epitope
TTLARAKGEI

SEQ ID NO: 52398 - protein, 10 aa, Artificial Sequence
  Description of Artificial Sequence: Synthetic epitope
TTLASSVDSA

SEQ ID NO: 52399 - protein, 10 aa, Artificial Sequence
  Description of Artificial Sequence: Synthetic epitope
TTLDATSDKK

SEQ ID NO: 52400 - protein, 10 aa, Artificial Sequence
  Description of Artificial Sequence: Synthetic epitope
TTLDGVLPTQ

SEQ ID NO: 52401 - protein, 10 aa, Artificial Sequence
  Description of Artificial Sequence: Synthetic epitope
TTLEQAIKSA

SEQ ID NO: 52402 - protein, 10 aa, Artificial Sequence
  Description of Artificial Sequence: Synthetic epitope
TTLESNVKKN

SEQ ID NO: 52403 - protein, 10 aa, Artificial Sequence
  Description of Artificial Sequence: Synthetic epitope
TTLETRAFGS

SEQ ID NO: 52404 - protein, 10 aa, Artificial Sequence
  Description of Artificial Sequence: Synthetic epitope
TTLFSTINQR

SEQ ID NO: 52405 - protein, 10 aa, Artificial Sequence
  Description of Artificial Sequence: Synthetic epitope
TTLIAIAGMT

SEQ ID NO: 52406 - protein, 10 aa, Artificial Sequence
  Description of Artificial Sequence: Synthetic epitope
TTLKELISQT

SEQ ID NO: 52407 - protein, 10 aa, Artificial Sequence
  Description of Artificial Sequence: Synthetic epitope
TTLKKRMQQI

SEQ ID NO: 52408 - protein, 10 aa, Artificial Sequence
  Description of Artificial Sequence: Synthetic epitope
TTLKRNNTNS

SEQ ID NO: 52409 - protein, 10 aa, Artificial Sequence
  Description of Artificial Sequence: Synthetic epitope
TTLKTVLDQQ

SEQ ID NO: 52410 - protein, 10 aa, Artificial Sequence
  Description of Artificial Sequence: Synthetic epitope
TTLPLTTLPS

SEQ ID NO: 52411 - protein, 10 aa, Artificial Sequence
  Description of Artificial Sequence: Synthetic epitope
TTLSALRLKQ

SEQ ID NO: 52412 - protein, 10 aa, Artificial Sequence
  Description of Artificial Sequence: Synthetic epitope
TTLSAQELVR

SEQ ID NO: 52413 - protein, 10 aa, Artificial Sequence
  Description of Artificial Sequence: Synthetic epitope
TTLSSEPGQS

SEQ ID NO: 52414 - protein, 10 aa, Artificial Sequence
  Description of Artificial Sequence: Synthetic epitope
TTLSVLKRIV

SEQ ID NO: 52415 - protein, 10 aa, Artificial Sequence
  Description of Artificial Sequence: Synthetic epitope
TTLTSAAYQQ

SEQ ID NO: 52416 - protein, 10 aa, Artificial Sequence
  Description of Artificial Sequence: Synthetic epitope
TTMAESSLLD

SEQ ID NO: 52417 - protein, 10 aa, Artificial Sequence
  Description of Artificial Sequence: Synthetic epitope
TTMESISNTS

SEQ ID NO: 52418 - protein, 10 aa, Artificial Sequence
  Description of Artificial Sequence: Synthetic epitope
TTMIDTAARD

SEQ ID NO: 52419 - protein, 10 aa, Artificial Sequence
  Description of Artificial Sequence: Synthetic epitope
TTMKERRVGR

SEQ ID NO: 52420 - protein, 10 aa, Artificial Sequence
  Description of Artificial Sequence: Synthetic epitope
TTMKSSVQEE

SEQ ID NO: 52421 - protein, 10 aa, Artificial Sequence
  Description of Artificial Sequence: Synthetic epitope
TTMKVLSNTT

SEQ ID NO: 52422 - protein, 10 aa, Artificial Sequence
  Description of Artificial Sequence: Synthetic epitope
TTMLKHERAR

SEQ ID NO: 52423 - protein, 10 aa, Artificial Sequence
  Description of Artificial Sequence: Synthetic epitope
TTMNSSLSEP

SEQ ID NO: 52424 - protein, 10 aa, Artificial Sequence
  Description of Artificial Sequence: Synthetic epitope
TTMPMSTTSE

SEQ ID NO: 52425 - protein, 10 aa, Artificial Sequence
  Description of Artificial Sequence: Synthetic epitope
TTMQIQVAGL

SEQ ID NO: 52426 - protein, 10 aa, Artificial Sequence
  Description of Artificial Sequence: Synthetic epitope
TTMSLSMRED

SEQ ID NO: 52427 - protein, 10 aa, Artificial Sequence
  Description of Artificial Sequence: Synthetic epitope
TTMTQHSRTQ

SEQ ID NO: 52428 - protein, 10 aa, Artificial Sequence
  Description of Artificial Sequence: Synthetic epitope
TTMVQVAGKV

SEQ ID NO: 52429 - protein, 10 aa, Artificial Sequence
  Description of Artificial Sequence: Synthetic epitope
TTMVRTAKAI

SEQ ID NO: 52430 - protein, 10 aa, Artificial Sequence
  Description of Artificial Sequence: Synthetic epitope
TTNENTYSNR

SEQ ID NO: 52431 - protein, 10 aa, Artificial Sequence
  Description of Artificial Sequence: Synthetic epitope
TTNGAQTFGP

SEQ ID NO: 52432 - protein, 10 aa, Artificial Sequence
  Description of Artificial Sequence: Synthetic epitope
TTNITKKQKW

SEQ ID NO: 52433 - protein, 10 aa, Artificial Sequence
  Description of Artificial Sequence: Synthetic epitope
TTNNSEALQI

SEQ ID NO: 52434 - protein, 10 aa, Artificial Sequence
  Description of Artificial Sequence: Synthetic epitope
TTNQRNITAQ

SEQ ID NO: 52435 - protein, 10 aa, Artificial Sequence
  Description of Artificial Sequence: Synthetic epitope
TTNSESLEEA

SEQ ID NO: 52436 - protein, 10 aa, Artificial Sequence
  Description of Artificial Sequence: Synthetic epitope
TTNVQNSQDK

SEQ ID NO: 52437 - protein, 10 aa, Artificial Sequence
  Description of Artificial Sequence: Synthetic epitope
TTPAAIKEAA

SEQ ID NO: 52438 - protein, 10 aa, Artificial Sequence
  Description of Artificial Sequence: Synthetic epitope
TTPAATVTSP

SEQ ID NO: 52439 - protein, 10 aa, Artificial Sequence
  Description of Artificial Sequence: Synthetic epitope
TTPAMTTAAP

SEQ ID NO: 52440 - protein, 10 aa, Artificial Sequence
  Description of Artificial Sequence: Synthetic epitope
TTPASRATSP

SEQ ID NO: 52441 - protein, 10 aa, Artificial Sequence
  Description of Artificial Sequence: Synthetic epitope
TTPATLTLPE

SEQ ID NO: 52442 - protein, 10 aa, Artificial Sequence
  Description of Artificial Sequence: Synthetic epitope
TTPGETKLLA

SEQ ID NO: 52443 - protein, 10 aa, Artificial Sequence
  Description of Artificial Sequence: Synthetic epitope
TTPKDMSETE

SEQ ID NO: 52444 - protein, 10 aa, Artificial Sequence
  Description of Artificial Sequence: Synthetic epitope
TTPLAMLAAT

SEQ ID NO: 52445 - protein, 10 aa, Artificial Sequence
  Description of Artificial Sequence: Synthetic epitope
TTPQQNKMDK

SEQ ID NO: 52446 - protein, 10 aa, Artificial Sequence
  Description of Artificial Sequence: Synthetic epitope
TTPSGKSVSS

SEQ ID NO: 52447 - protein, 10 aa, Artificial Sequence
  Description of Artificial Sequence: Synthetic epitope
TTPTAALASA

SEQ ID NO: 52448 - protein, 10 aa, Artificial Sequence
  Description of Artificial Sequence: Synthetic epitope
TTPVASQQNA

SEQ ID NO: 52449 - protein, 10 aa, Artificial Sequence
  Description of Artificial Sequence: Synthetic epitope
TTPYLQSVKK

SEQ ID NO: 52450 - protein, 10 aa, Artificial Sequence
  Description of Artificial Sequence: Synthetic epitope
TTQASEATQA

SEQ ID NO: 52451 - protein, 10 aa, Artificial Sequence
  Description of Artificial Sequence: Synthetic epitope
TTQDNKNPHV

SEQ ID NO: 52452 - protein, 10 aa, Artificial Sequence
  Description of Artificial Sequence: Synthetic epitope
TTQGQITNET

SEQ ID NO: 52453 - protein, 10 aa, Artificial Sequence
  Description of Artificial Sequence: Synthetic epitope
TTQGVRAVTS

SEQ ID NO: 52454 - protein, 10 aa, Artificial Sequence
  Description of Artificial Sequence: Synthetic epitope
TTQIVKITYK

SEQ ID NO: 52455 - protein, 10 aa, Artificial Sequence
  Description of Artificial Sequence: Synthetic epitope
TTQLRAKVSS

SEQ ID NO: 52456 - protein, 10 aa, Artificial Sequence
  Description of Artificial Sequence: Synthetic epitope
TTQPTIAKGR

SEQ ID NO: 52457 - protein, 10 aa, Artificial Sequence
  Description of Artificial Sequence: Synthetic epitope
TTQQVVKLIG

SEQ ID NO: 52458 - protein, 10 aa, Artificial Sequence
  Description of Artificial Sequence: Synthetic epitope
TTQRESSDYS

SEQ ID NO: 52459 - protein, 10 aa, Artificial Sequence
  Description of Artificial Sequence: Synthetic epitope
TTQRQEIEST

SEQ ID NO: 52460 - protein, 10 aa, Artificial Sequence
  Description of Artificial Sequence: Synthetic epitope
TTQSKSSTKK

SEQ ID NO: 52461 - protein, 10 aa, Artificial Sequence
  Description of Artificial Sequence: Synthetic epitope
TTQVGMHDIV

SEQ ID NO: 52462 - protein, 10 aa, Artificial Sequence
  Description of Artificial Sequence: Synthetic epitope
TTRATLLTRS

SEQ ID NO: 52463 - protein, 10 aa, Artificial Sequence
  Description of Artificial Sequence: Synthetic epitope
TTRKFQATGS

SEQ ID NO: 52464 - protein, 10 aa, Artificial Sequence
  Description of Artificial Sequence: Synthetic epitope
TTRKKETYQS

SEQ ID NO: 52465 - protein, 10 aa, Artificial Sequence
  Description of Artificial Sequence: Synthetic epitope
TTRLPPYATR

SEQ ID NO: 52466 - protein, 10 aa, Artificial Sequence
  Description of Artificial Sequence: Synthetic epitope
TTRLTEMLKT

SEQ ID NO: 52467 - protein, 10 aa, Artificial Sequence
  Description of Artificial Sequence: Synthetic epitope
TTRQATKDPL

SEQ ID NO: 52468 - protein, 10 aa, Artificial Sequence
  Description of Artificial Sequence: Synthetic epitope
TTRRKEMTSL

SEQ ID NO: 52469 - protein, 10 aa, Artificial Sequence
  Description of Artificial Sequence: Synthetic epitope
TTRSHHGFKG

SEQ ID NO: 52470 - protein, 10 aa, Artificial Sequence
  Description of Artificial Sequence: Synthetic epitope
TTRSWRKSEQ

SEQ ID NO: 52471 - protein, 10 aa, Artificial Sequence
  Description of Artificial Sequence: Synthetic epitope
TTRSYRNRHQ

SEQ ID NO: 52472 - protein, 10 aa, Artificial Sequence
  Description of Artificial Sequence: Synthetic epitope
TTRTQMEMLT

SEQ ID NO: 52473 - protein, 10 aa, Artificial Sequence
  Description of Artificial Sequence: Synthetic epitope
TTSAIKSQSA

SEQ ID NO: 52474 - protein, 10 aa, Artificial Sequence
  Description of Artificial Sequence: Synthetic epitope
TTSAPLIRRQ

SEQ ID NO: 52475 - protein, 10 aa, Artificial Sequence
  Description of Artificial Sequence: Synthetic epitope
TTSDFQETQK

SEQ ID NO: 52476 - protein, 10 aa, Artificial Sequence
  Description of Artificial Sequence: Synthetic epitope
TTSDLQKTSE

SEQ ID NO: 52477 - protein, 10 aa, Artificial Sequence
  Description of Artificial Sequence: Synthetic epitope
TTSDTKTVSE

SEQ ID NO: 52478 - protein, 10 aa, Artificial Sequence
  Description of Artificial Sequence: Synthetic epitope
TTSEGSVSTK

SEQ ID NO: 52479 - protein, 10 aa, Artificial Sequence
  Description of Artificial Sequence: Synthetic epitope
TTSEHTAKKM

SEQ ID NO: 52480 - protein, 10 aa, Artificial Sequence
  Description of Artificial Sequence: Synthetic epitope
TTSESEVEPA

SEQ ID NO: 52481 - protein, 10 aa, Artificial Sequence
  Description of Artificial Sequence: Synthetic epitope
TTSESSVDVS

SEQ ID NO: 52482 - protein, 10 aa, Artificial Sequence
  Description of Artificial Sequence: Synthetic epitope
TTSFASAPPR

SEQ ID NO: 52483 - protein, 10 aa, Artificial Sequence
  Description of Artificial Sequence: Synthetic epitope
TTSGSRQAAR

SEQ ID NO: 52484 - protein, 10 aa, Artificial Sequence
  Description of Artificial Sequence: Synthetic epitope
TTSGSSQEST

SEQ ID NO: 52485 - protein, 10 aa, Artificial Sequence
  Description of Artificial Sequence: Synthetic epitope
TTSHTTAKPA

SEQ ID NO: 52486 - protein, 10 aa, Artificial Sequence
  Description of Artificial Sequence: Synthetic epitope
TTSKEIISSE

SEQ ID NO: 52487 - protein, 10 aa, Artificial Sequence
  Description of Artificial Sequence: Synthetic epitope
TTSKEVEFVL

SEQ ID NO: 52488 - protein, 10 aa, Artificial Sequence
  Description of Artificial Sequence: Synthetic epitope
TTSKSIKDPR

SEQ ID NO: 52489 - protein, 10 aa, Artificial Sequence
  Description of Artificial Sequence: Synthetic epitope
TTSKSLQNQS

SEQ ID NO: 52490 - protein, 10 aa, Artificial Sequence
  Description of Artificial Sequence: Synthetic epitope
TTSKTLQKQH

SEQ ID NO: 52491 - protein, 10 aa, Artificial Sequence
  Description of Artificial Sequence: Synthetic epitope
TTSLQTADKT

SEQ ID NO: 52492 - protein, 10 aa, Artificial Sequence
  Description of Artificial Sequence: Synthetic epitope
TTSMTSVPKP

SEQ ID NO: 52493 - protein, 10 aa, Artificial Sequence
  Description of Artificial Sequence: Synthetic epitope
TTSNHSVQNR

SEQ ID NO: 52494 - protein, 10 aa, Artificial Sequence
  Description of Artificial Sequence: Synthetic epitope
TTSNIRKVHV

SEQ ID NO: 52495 - protein, 10 aa, Artificial Sequence
  Description of Artificial Sequence: Synthetic epitope
TTSNIRKVHV

SEQ ID NO: 52496 - protein, 10 aa, Artificial Sequence
  Description of Artificial Sequence: Synthetic epitope
TTSNITSRPA

SEQ ID NO: 52497 - protein, 10 aa, Artificial Sequence
  Description of Artificial Sequence: Synthetic epitope
TTSNMLLKPP

SEQ ID NO: 52498 - protein, 10 aa, Artificial Sequence
  Description of Artificial Sequence: Synthetic epitope
TTSNSSITYK

SEQ ID NO: 52499 - protein, 10 aa, Artificial Sequence
  Description of Artificial Sequence: Synthetic epitope
TTSPSYTNTA

SEQ ID NO: 52500 - protein, 10 aa, Artificial Sequence
  Description of Artificial Sequence: Synthetic epitope
TTSQKSGSVT

SEQ ID NO: 52501 - protein, 10 aa, Artificial Sequence
  Description of Artificial Sequence: Synthetic epitope
TTSQSLPKPS

SEQ ID NO: 52502 - protein, 10 aa, Artificial Sequence
  Description of Artificial Sequence: Synthetic epitope
TTSQSSKQPP

SEQ ID NO: 52503 - protein, 10 aa, Artificial Sequence
  Description of Artificial Sequence: Synthetic epitope
TTSQVQVPQI

SEQ ID NO: 52504 - protein, 10 aa, Artificial Sequence
  Description of Artificial Sequence: Synthetic epitope
TTSRLLKQQR

SEQ ID NO: 52505 - protein, 10 aa, Artificial Sequence
  Description of Artificial Sequence: Synthetic epitope
TTSRSMTDKL

SEQ ID NO: 52506 - protein, 10 aa, Artificial Sequence
  Description of Artificial Sequence: Synthetic epitope
TTSSAATETM

SEQ ID NO: 52507 - protein, 10 aa, Artificial Sequence
  Description of Artificial Sequence: Synthetic epitope
TTSSEAESGA

SEQ ID NO: 52508 - protein, 10 aa, Artificial Sequence
  Description of Artificial Sequence: Synthetic epitope
TTSSETRQSE

SEQ ID NO: 52509 - protein, 10 aa, Artificial Sequence
  Description of Artificial Sequence: Synthetic epitope
TTSSHESSTH

SEQ ID NO: 52510 - protein, 10 aa, Artificial Sequence
  Description of Artificial Sequence: Synthetic epitope
TTSSLLIQLK

SEQ ID NO: 52511 - protein, 10 aa, Artificial Sequence
  Description of Artificial Sequence: Synthetic epitope
TTSSLSTKST

SEQ ID NO: 52512 - protein, 10 aa, Artificial Sequence
  Description of Artificial Sequence: Synthetic epitope
TTSSPTNSSP

SEQ ID NO: 52513 - protein, 10 aa, Artificial Sequence
  Description of Artificial Sequence: Synthetic epitope
TTSSQANLSV

SEQ ID NO: 52514 - protein, 10 aa, Artificial Sequence
  Description of Artificial Sequence: Synthetic epitope
TTSSQSEPSE

SEQ ID NO: 52515 - protein, 10 aa, Artificial Sequence
  Description of Artificial Sequence: Synthetic epitope
TTSSTRATPA

SEQ ID NO: 52516 - protein, 10 aa, Artificial Sequence
  Description of Artificial Sequence: Synthetic epitope
TTSSVTSSII

SEQ ID NO: 52517 - protein, 10 aa, Artificial Sequence
  Description of Artificial Sequence: Synthetic epitope
TTSSYMSGEG

SEQ ID NO: 52518 - protein, 10 aa, Artificial Sequence
  Description of Artificial Sequence: Synthetic epitope
TTSTELDESR

SEQ ID NO: 52519 - protein, 10 aa, Artificial Sequence
  Description of Artificial Sequence: Synthetic epitope
TTSTISRNIT

SEQ ID NO: 52520 - protein, 10 aa, Artificial Sequence
  Description of Artificial Sequence: Synthetic epitope
TTSTKKMMEE

SEQ ID NO: 52521 - protein, 10 aa, Artificial Sequence
  Description of Artificial Sequence: Synthetic epitope
TTSVRAVPAE

SEQ ID NO: 52522 - protein, 10 aa, Artificial Sequence
  Description of Artificial Sequence: Synthetic epitope
TTSVSSWPYS

SEQ ID NO: 52523 - protein, 10 aa, Artificial Sequence
  Description of Artificial Sequence: Synthetic epitope
TTVASDKLLT

SEQ ID NO: 52524 - protein, 10 aa, Artificial Sequence
  Description of Artificial Sequence: Synthetic epitope
TTVATMRSVN

SEQ ID NO: 52525 - protein, 10 aa, Artificial Sequence
  Description of Artificial Sequence: Synthetic epitope
TTVEIDIAQE

SEQ ID NO: 52526 - protein, 10 aa, Artificial Sequence
  Description of Artificial Sequence: Synthetic epitope
TTVFRTSKPF

SEQ ID NO: 52527 - protein, 10 aa, Artificial Sequence
  Description of Artificial Sequence: Synthetic epitope
TTVGSNKKAE

SEQ ID NO: 52528 - protein, 10 aa, Artificial Sequence
  Description of Artificial Sequence: Synthetic epitope
TTVHEKTQSK

SEQ ID NO: 52529 - protein, 10 aa, Artificial Sequence
  Description of Artificial Sequence: Synthetic epitope
TTVHRIAKPF

SEQ ID NO: 52530 - protein, 10 aa, Artificial Sequence
  Description of Artificial Sequence: Synthetic epitope
TTVKGVIKAV

SEQ ID NO: 52531 - protein, 10 aa, Artificial Sequence
  Description of Artificial Sequence: Synthetic epitope
TTVKIQTEQQ

SEQ ID NO: 52532 - protein, 10 aa, Artificial Sequence
  Description of Artificial Sequence: Synthetic epitope
TTVKKFFSAS

SEQ ID NO: 52533 - protein, 10 aa, Artificial Sequence
  Description of Artificial Sequence: Synthetic epitope
TTVKMSKFGG

SEQ ID NO: 52534 - protein, 10 aa, Artificial Sequence
  Description of Artificial Sequence: Synthetic epitope
TTVKSKVDER

SEQ ID NO: 52535 - protein, 10 aa, Artificial Sequence
  Description of Artificial Sequence: Synthetic epitope
TTVLIKTAKV

SEQ ID NO: 52536 - protein, 10 aa, Artificial Sequence
  Description of Artificial Sequence: Synthetic epitope
TTVLTSVSED

SEQ ID NO: 52537 - protein, 10 aa, Artificial Sequence
  Description of Artificial Sequence: Synthetic epitope
TTVPATLAAT

SEQ ID NO: 52538 - protein, 10 aa, Artificial Sequence
  Description of Artificial Sequence: Synthetic epitope
TTVPTTMSIP

SEQ ID NO: 52539 - protein, 10 aa, Artificial Sequence
  Description of Artificial Sequence: Synthetic epitope
TTVSSQASPS

SEQ ID NO: 52540 - protein, 10 aa, Artificial Sequence
  Description of Artificial Sequence: Synthetic epitope
TTVTESLQHK

SEQ ID NO: 52541 - protein, 10 aa, Artificial Sequence
  Description of Artificial Sequence: Synthetic epitope
TTVTRSTSRA

SEQ ID NO: 52542 - protein, 10 aa, Artificial Sequence
  Description of Artificial Sequence: Synthetic epitope
TTVTSQIQQV

SEQ ID NO: 52543 - protein, 10 aa, Artificial Sequence
  Description of Artificial Sequence: Synthetic epitope
TTVTVQSPRQ

SEQ ID NO: 52544 - protein, 10 aa, Artificial Sequence
  Description of Artificial Sequence: Synthetic epitope
TTVVGGVTKT

SEQ ID NO: 52545 - protein, 10 aa, Artificial Sequence
  Description of Artificial Sequence: Synthetic epitope
TTVVTTQSAE

SEQ ID NO: 52546 - protein, 10 aa, Artificial Sequence
  Description of Artificial Sequence: Synthetic epitope
TTYSVSAQSS

SEQ ID NO: 52547 - protein, 10 aa, Artificial Sequence
  Description of Artificial Sequence: Synthetic epitope
TTYTQKAKQA

SEQ ID NO: 52548 - protein, 10 aa, Artificial Sequence
  Description of Artificial Sequence: Synthetic epitope
TVAADKSTRN

SEQ ID NO: 52549 - protein, 10 aa, Artificial Sequence
  Description of Artificial Sequence: Synthetic epitope
TVAENSEKNK

SEQ ID NO: 52550 - protein, 10 aa, Artificial Sequence
  Description of Artificial Sequence: Synthetic epitope
TVAESVSQQI

SEQ ID NO: 52551 - protein, 10 aa, Artificial Sequence
  Description of Artificial Sequence: Synthetic epitope
TVAGTARSAK

SEQ ID NO: 52552 - protein, 10 aa, Artificial Sequence
  Description of Artificial Sequence: Synthetic epitope
TVAHLVGALR

SEQ ID NO: 52553 - protein, 10 aa, Artificial Sequence
  Description of Artificial Sequence: Synthetic epitope
TVAITTALSK

SEQ ID NO: 52554 - protein, 10 aa, Artificial Sequence
  Description of Artificial Sequence: Synthetic epitope
TVAKKASSLQ

SEQ ID NO: 52555 - protein, 10 aa, Artificial Sequence
  Description of Artificial Sequence: Synthetic epitope
TVAKSQFSRS

SEQ ID NO: 52556 - protein, 10 aa, Artificial Sequence
  Description of Artificial Sequence: Synthetic epitope
TVAKVQVNSE

SEQ ID NO: 52557 - protein, 10 aa, Artificial Sequence
  Description of Artificial Sequence: Synthetic epitope
TVAPKSTTFL

SEQ ID NO: 52558 - protein, 10 aa, Artificial Sequence
  Description of Artificial Sequence: Synthetic epitope
TVARASLEGQ

SEQ ID NO: 52559 - protein, 10 aa, Artificial Sequence
  Description of Artificial Sequence: Synthetic epitope
TVARSSVKET

SEQ ID NO: 52560 - protein, 10 aa, Artificial Sequence
  Description of Artificial Sequence: Synthetic epitope
TVASKSTAII

SEQ ID NO: 52561 - protein, 10 aa, Artificial Sequence
  Description of Artificial Sequence: Synthetic epitope
TVATALLRTR

SEQ ID NO: 52562 - protein, 10 aa, Artificial Sequence
  Description of Artificial Sequence: Synthetic epitope
TVATGSMATP

SEQ ID NO: 52563 - protein, 10 aa, Artificial Sequence
  Description of Artificial Sequence: Synthetic epitope
TVATGSMATP

SEQ ID NO: 52564 - protein, 10 aa, Artificial Sequence
  Description of Artificial Sequence: Synthetic epitope
TVATGSMATP

SEQ ID NO: 52565 - protein, 10 aa, Artificial Sequence
  Description of Artificial Sequence: Synthetic epitope
TVATGSMATP

SEQ ID NO: 52566 - protein, 10 aa, Artificial Sequence
  Description of Artificial Sequence: Synthetic epitope
TVAVTIIPSI

SEQ ID NO: 52567 - protein, 10 aa, Artificial Sequence
  Description of Artificial Sequence: Synthetic epitope
TVDASIPTSQ

SEQ ID NO: 52568 - protein, 10 aa, Artificial Sequence
  Description of Artificial Sequence: Synthetic epitope
TVDDKMSLRL

SEQ ID NO: 52569 - protein, 10 aa, Artificial Sequence
  Description of Artificial Sequence: Synthetic epitope
TVDDNPTKPT

SEQ ID NO: 52570 - protein, 10 aa, Artificial Sequence
  Description of Artificial Sequence: Synthetic epitope
TVDEKLKGDT

SEQ ID NO: 52571 - protein, 10 aa, Artificial Sequence
  Description of Artificial Sequence: Synthetic epitope
TVDRQKSSLS

SEQ ID NO: 52572 - protein, 10 aa, Artificial Sequence
  Description of Artificial Sequence: Synthetic epitope
TVDSRVSSRF

SEQ ID NO: 52573 - protein, 10 aa, Artificial Sequence
  Description of Artificial Sequence: Synthetic epitope
TVEAKQSEAE

SEQ ID NO: 52574 - protein, 10 aa, Artificial Sequence
  Description of Artificial Sequence: Synthetic epitope
TVEAQVNIGI

SEQ ID NO: 52575 - protein, 10 aa, Artificial Sequence
  Description of Artificial Sequence: Synthetic epitope
TVEERAKHDQ

SEQ ID NO: 52576 - protein, 10 aa, Artificial Sequence
  Description of Artificial Sequence: Synthetic epitope
TVEERVAQEA

SEQ ID NO: 52577 - protein, 10 aa, Artificial Sequence
  Description of Artificial Sequence: Synthetic epitope
TVEETARAAD

SEQ ID NO: 52578 - protein, 10 aa, Artificial Sequence
  Description of Artificial Sequence: Synthetic epitope
TVEGMEMKGP

SEQ ID NO: 52579 - protein, 10 aa, Artificial Sequence
  Description of Artificial Sequence: Synthetic epitope
TVEIKSVRSS

SEQ ID NO: 52580 - protein, 10 aa, Artificial Sequence
  Description of Artificial Sequence: Synthetic epitope
TVEKAASQST

SEQ ID NO: 52581 - protein, 10 aa, Artificial Sequence
  Description of Artificial Sequence: Synthetic epitope
TVELERAKTQ

SEQ ID NO: 52582 - protein, 10 aa, Artificial Sequence
  Description of Artificial Sequence: Synthetic epitope
TVELVAEQKN

SEQ ID NO: 52583 - protein, 10 aa, Artificial Sequence
  Description of Artificial Sequence: Synthetic epitope
TVENAIQITS

SEQ ID NO: 52584 - protein, 10 aa, Artificial Sequence
  Description of Artificial Sequence: Synthetic epitope
TVENETYTLK

SEQ ID NO: 52585 - protein, 10 aa, Artificial Sequence
  Description of Artificial Sequence: Synthetic epitope
TVEQRKKLSS

SEQ ID NO: 52586 - protein, 10 aa, Artificial Sequence
  Description of Artificial Sequence: Synthetic epitope
TVERMYDVTP

SEQ ID NO: 52587 - protein, 10 aa, Artificial Sequence
  Description of Artificial Sequence: Synthetic epitope
TVESIFGTEP

SEQ ID NO: 52588 - protein, 10 aa, Artificial Sequence
  Description of Artificial Sequence: Synthetic epitope
TVETRAQKAR

SEQ ID NO: 52589 - protein, 10 aa, Artificial Sequence
  Description of Artificial Sequence: Synthetic epitope
TVEVQIQLNQ

SEQ ID NO: 52590 - protein, 10 aa, Artificial Sequence
  Description of Artificial Sequence: Synthetic epitope
TVFETSQQNS

SEQ ID NO: 52591 - protein, 10 aa, Artificial Sequence
  Description of Artificial Sequence: Synthetic epitope
TVFSKSFEQV

SEQ ID NO: 52592 - protein, 10 aa, Artificial Sequence
  Description of Artificial Sequence: Synthetic epitope
TVFTASKPKS

SEQ ID NO: 52593 - protein, 10 aa, Artificial Sequence
  Description of Artificial Sequence: Synthetic epitope
TVGAQNSQKT

SEQ ID NO: 52594 - protein, 10 aa, Artificial Sequence
  Description of Artificial Sequence: Synthetic epitope
TVGAQSQILE

SEQ ID NO: 52595 - protein, 10 aa, Artificial Sequence
  Description of Artificial Sequence: Synthetic epitope
TVGESRQMVA

SEQ ID NO: 52596 - protein, 10 aa, Artificial Sequence
  Description of Artificial Sequence: Synthetic epitope
TVGFSQQDTK

SEQ ID NO: 52597 - protein, 10 aa, Artificial Sequence
  Description of Artificial Sequence: Synthetic epitope
TVGLSAIRIK

SEQ ID NO: 52598 - protein, 10 aa, Artificial Sequence
  Description of Artificial Sequence: Synthetic epitope
TVGMKIQEEL

SEQ ID NO: 52599 - protein, 10 aa, Artificial Sequence
  Description of Artificial Sequence: Synthetic epitope
TVGSLTFMEL

SEQ ID NO: 52600 - protein, 10 aa, Artificial Sequence
  Description of Artificial Sequence: Synthetic epitope
TVGSRQQATQ

SEQ ID NO: 52601 - protein, 10 aa, Artificial Sequence
  Description of Artificial Sequence: Synthetic epitope
TVHRKWSANE

SEQ ID NO: 52602 - protein, 10 aa, Artificial Sequence
  Description of Artificial Sequence: Synthetic epitope
TVHSKDRVKS

SEQ ID NO: 52603 - protein, 10 aa, Artificial Sequence
  Description of Artificial Sequence: Synthetic epitope
TVIDSSVMEQ

SEQ ID NO: 52604 - protein, 10 aa, Artificial Sequence
  Description of Artificial Sequence: Synthetic epitope
TVIEKTESWP

SEQ ID NO: 52605 - protein, 10 aa, Artificial Sequence
  Description of Artificial Sequence: Synthetic epitope
TVIKQAVQKV

SEQ ID NO: 52606 - protein, 10 aa, Artificial Sequence
  Description of Artificial Sequence: Synthetic epitope
TVILNAVNAE

SEQ ID NO: 52607 - protein, 10 aa, Artificial Sequence
  Description of Artificial Sequence: Synthetic epitope
TVINQQEDSS

SEQ ID NO: 52608 - protein, 10 aa, Artificial Sequence
  Description of Artificial Sequence: Synthetic epitope
TVIQEALALD

SEQ ID NO: 52609 - protein, 10 aa, Artificial Sequence
  Description of Artificial Sequence: Synthetic epitope
TVKAKPVKAS

SEQ ID NO: 52610 - protein, 10 aa, Artificial Sequence
  Description of Artificial Sequence: Synthetic epitope
TVKAQTKAPP

SEQ ID NO: 52611 - protein, 10 aa, Artificial Sequence
  Description of Artificial Sequence: Synthetic epitope
TVKARSRDSD

SEQ ID NO: 52612 - protein, 10 aa, Artificial Sequence
  Description of Artificial Sequence: Synthetic epitope
TVKEATAGNP

SEQ ID NO: 52613 - protein, 10 aa, Artificial Sequence
  Description of Artificial Sequence: Synthetic epitope
TVKEKLSIRS

SEQ ID NO: 52614 - protein, 10 aa, Artificial Sequence
  Description of Artificial Sequence: Synthetic epitope
TVKESIIEKT

SEQ ID NO: 52615 - protein, 10 aa, Artificial Sequence
  Description of Artificial Sequence: Synthetic epitope
TVKGKLLTGI

SEQ ID NO: 52616 - protein, 10 aa, Artificial Sequence
  Description of Artificial Sequence: Synthetic epitope
TVKIKKMEDK

SEQ ID NO: 52617 - protein, 10 aa, Artificial Sequence
  Description of Artificial Sequence: Synthetic epitope
TVKKNKQQDH

SEQ ID NO: 52618 - protein, 10 aa, Artificial Sequence
  Description of Artificial Sequence: Synthetic epitope
TVKKQQGEQI

SEQ ID NO: 52619 - protein, 10 aa, Artificial Sequence
  Description of Artificial Sequence: Synthetic epitope
TVKQSSTATS

SEQ ID NO: 52620 - protein, 10 aa, Artificial Sequence
  Description of Artificial Sequence: Synthetic epitope
TVKRKMTRAW

SEQ ID NO: 52621 - protein, 10 aa, Artificial Sequence
  Description of Artificial Sequence: Synthetic epitope
TVKSVTSDTI

SEQ ID NO: 52622 - protein, 10 aa, Artificial Sequence
  Description of Artificial Sequence: Synthetic epitope
TVKVALNSNE

SEQ ID NO: 52623 - protein, 10 aa, Artificial Sequence
  Description of Artificial Sequence: Synthetic epitope
TVKVINVRNL

SEQ ID NO: 52624 - protein, 10 aa, Artificial Sequence
  Description of Artificial Sequence: Synthetic epitope
TVKVVDKLEN

SEQ ID NO: 52625 - protein, 10 aa, Artificial Sequence
  Description of Artificial Sequence: Synthetic epitope
TVLATKTAEY

SEQ ID NO: 52626 - protein, 10 aa, Artificial Sequence
  Description of Artificial Sequence: Synthetic epitope
TVLDKTLSVN

SEQ ID NO: 52627 - protein, 10 aa, Artificial Sequence
  Description of Artificial Sequence: Synthetic epitope
TVLEEKLVSS

SEQ ID NO: 52628 - protein, 10 aa, Artificial Sequence
  Description of Artificial Sequence: Synthetic epitope
TVLFGVQPKF

SEQ ID NO: 52629 - protein, 10 aa, Artificial Sequence
  Description of Artificial Sequence: Synthetic epitope
TVLKMSSMTS

SEQ ID NO: 52630 - protein, 10 aa, Artificial Sequence
  Description of Artificial Sequence: Synthetic epitope
TVLKQPFRSS

SEQ ID NO: 52631 - protein, 10 aa, Artificial Sequence
  Description of Artificial Sequence: Synthetic epitope
TVLKYVQEDS

SEQ ID NO: 52632 - protein, 10 aa, Artificial Sequence
  Description of Artificial Sequence: Synthetic epitope
TVLQTSADFI

SEQ ID NO: 52633 - protein, 10 aa, Artificial Sequence
  Description of Artificial Sequence: Synthetic epitope
TVLRLMIRQR

SEQ ID NO: 52634 - protein, 10 aa, Artificial Sequence
  Description of Artificial Sequence: Synthetic epitope
TVLTPNTESS

SEQ ID NO: 52635 - protein, 10 aa, Artificial Sequence
  Description of Artificial Sequence: Synthetic epitope
TVMATALMPK

SEQ ID NO: 52636 - protein, 10 aa, Artificial Sequence
  Description of Artificial Sequence: Synthetic epitope
TVMAWFTEED

SEQ ID NO: 52637 - protein, 10 aa, Artificial Sequence
  Description of Artificial Sequence: Synthetic epitope
TVMGHRQNRP

SEQ ID NO: 52638 - protein, 10 aa, Artificial Sequence
  Description of Artificial Sequence: Synthetic epitope
TVMGKASTPG

SEQ ID NO: 52639 - protein, 10 aa, Artificial Sequence
  Description of Artificial Sequence: Synthetic epitope
TVMKVEKAPQ

SEQ ID NO: 52640 - protein, 10 aa, Artificial Sequence
  Description of Artificial Sequence: Synthetic epitope
TVMRIIKKSF

SEQ ID NO: 52641 - protein, 10 aa, Artificial Sequence
  Description of Artificial Sequence: Synthetic epitope
TVMVDAADLV

SEQ ID NO: 52642 - protein, 10 aa, Artificial Sequence
  Description of Artificial Sequence: Synthetic epitope
TVMVEKHKTE

SEQ ID NO: 52643 - protein, 10 aa, Artificial Sequence
  Description of Artificial Sequence: Synthetic epitope
TVNATGSSAA

SEQ ID NO: 52644 - protein, 10 aa, Artificial Sequence
  Description of Artificial Sequence: Synthetic epitope
TVNFESSGEG

SEQ ID NO: 52645 - protein, 10 aa, Artificial Sequence
  Description of Artificial Sequence: Synthetic epitope
TVNKAAHVQQ

SEQ ID NO: 52646 - protein, 10 aa, Artificial Sequence
  Description of Artificial Sequence: Synthetic epitope
TVNKKLKTDH

SEQ ID NO: 52647 - protein, 10 aa, Artificial Sequence
  Description of Artificial Sequence: Synthetic epitope
TVNQGFLSNS

SEQ ID NO: 52648 - protein, 10 aa, Artificial Sequence
  Description of Artificial Sequence: Synthetic epitope
TVNTLTNSPA

SEQ ID NO: 52649 - protein, 10 aa, Artificial Sequence
  Description of Artificial Sequence: Synthetic epitope
TVPDAYLITT

SEQ ID NO: 52650 - protein, 10 aa, Artificial Sequence
  Description of Artificial Sequence: Synthetic epitope
TVQEEVQLEE

SEQ ID NO: 52651 - protein, 10 aa, Artificial Sequence
  Description of Artificial Sequence: Synthetic epitope
TVQENQSAGQ

SEQ ID NO: 52652 - protein, 10 aa, Artificial Sequence
  Description of Artificial Sequence: Synthetic epitope
TVQNEANKYQ

SEQ ID NO: 52653 - protein, 10 aa, Artificial Sequence
  Description of Artificial Sequence: Synthetic epitope
TVQTYSAIEE

SEQ ID NO: 52654 - protein, 10 aa, Artificial Sequence
  Description of Artificial Sequence: Synthetic epitope
TVQVTTSNQT

SEQ ID NO: 52655 - protein, 10 aa, Artificial Sequence
  Description of Artificial Sequence: Synthetic epitope
TVRALTRHDT

SEQ ID NO: 52656 - protein, 10 aa, Artificial Sequence
  Description of Artificial Sequence: Synthetic epitope
TVRDKMETLS

SEQ ID NO: 52657 - protein, 10 aa, Artificial Sequence
  Description of Artificial Sequence: Synthetic epitope
TVRLEALDES

SEQ ID NO: 52658 - protein, 10 aa, Artificial Sequence
  Description of Artificial Sequence: Synthetic epitope
TVRPFVSLQD

SEQ ID NO: 52659 - protein, 10 aa, Artificial Sequence
  Description of Artificial Sequence: Synthetic epitope
TVRQRSRVKN

SEQ ID NO: 52660 - protein, 10 aa, Artificial Sequence
  Description of Artificial Sequence: Synthetic epitope
TVRRTMNIVP

SEQ ID NO: 52661 - protein, 10 aa, Artificial Sequence
  Description of Artificial Sequence: Synthetic epitope
TVRTIQSSTV

SEQ ID NO: 52662 - protein, 10 aa, Artificial Sequence
  Description of Artificial Sequence: Synthetic epitope
TVSAHSAKVK

SEQ ID NO: 52663 - protein, 10 aa, Artificial Sequence
  Description of Artificial Sequence: Synthetic epitope
TVSAKALGAM

SEQ ID NO: 52664 - protein, 10 aa, Artificial Sequence
  Description of Artificial Sequence: Synthetic epitope
TVSAKTIAEQ

SEQ ID NO: 52665 - protein, 10 aa, Artificial Sequence
  Description of Artificial Sequence: Synthetic epitope
TVSAQASAKI

SEQ ID NO: 52666 - protein, 10 aa, Artificial Sequence
  Description of Artificial Sequence: Synthetic epitope
TVSASVQSVP

SEQ ID NO: 52667 - protein, 10 aa, Artificial Sequence
  Description of Artificial Sequence: Synthetic epitope
TVSATSASAG

SEQ ID NO: 52668 - protein, 10 aa, Artificial Sequence
  Description of Artificial Sequence: Synthetic epitope
TVSESVQRNK

SEQ ID NO: 52669 - protein, 10 aa, Artificial Sequence
  Description of Artificial Sequence: Synthetic epitope
TVSEVKMVKD

SEQ ID NO: 52670 - protein, 10 aa, Artificial Sequence
  Description of Artificial Sequence: Synthetic epitope
TVSFGASTRA

SEQ ID NO: 52671 - protein, 10 aa, Artificial Sequence
  Description of Artificial Sequence: Synthetic epitope
TVSFSQALVE

SEQ ID NO: 52672 - protein, 10 aa, Artificial Sequence
  Description of Artificial Sequence: Synthetic epitope
TVSKKGEMLN

SEQ ID NO: 52673 - protein, 10 aa, Artificial Sequence
  Description of Artificial Sequence: Synthetic epitope
TVSKLAEARR

SEQ ID NO: 52674 - protein, 10 aa, Artificial Sequence
  Description of Artificial Sequence: Synthetic epitope
TVSKNTSLPP

SEQ ID NO: 52675 - protein, 10 aa, Artificial Sequence
  Description of Artificial Sequence: Synthetic epitope
TVSKTRKGVQ

SEQ ID NO: 52676 - protein, 10 aa, Artificial Sequence
  Description of Artificial Sequence: Synthetic epitope
TVSKTRKGVQ

SEQ ID NO: 52677 - protein, 10 aa, Artificial Sequence
  Description of Artificial Sequence: Synthetic epitope
TVSNTTAQNA

SEQ ID NO: 52678 - protein, 10 aa, Artificial Sequence
  Description of Artificial Sequence: Synthetic epitope
TVSPQVEDSE

SEQ ID NO: 52679 - protein, 10 aa, Artificial Sequence
  Description of Artificial Sequence: Synthetic epitope
TVSQASGDTS

SEQ ID NO: 52680 - protein, 10 aa, Artificial Sequence
  Description of Artificial Sequence: Synthetic epitope
TVSQKKSSKL

SEQ ID NO: 52681 - protein, 10 aa, Artificial Sequence
  Description of Artificial Sequence: Synthetic epitope
TVSQSTTVVN

SEQ ID NO: 52682 - protein, 10 aa, Artificial Sequence
  Description of Artificial Sequence: Synthetic epitope
TVSRTGRQVL

SEQ ID NO: 52683 - protein, 10 aa, Artificial Sequence
  Description of Artificial Sequence: Synthetic epitope
TVSRVTTEAS

SEQ ID NO: 52684 - protein, 10 aa, Artificial Sequence
  Description of Artificial Sequence: Synthetic epitope
TVSSATLSEE

SEQ ID NO: 52685 - protein, 10 aa, Artificial Sequence
  Description of Artificial Sequence: Synthetic epitope
TVSSEISSAA

SEQ ID NO: 52686 - protein, 10 aa, Artificial Sequence
  Description of Artificial Sequence: Synthetic epitope
TVSSGELATV

SEQ ID NO: 52687 - protein, 10 aa, Artificial Sequence
  Description of Artificial Sequence: Synthetic epitope
TVSSLVDARF

SEQ ID NO: 52688 - protein, 10 aa, Artificial Sequence
  Description of Artificial Sequence: Synthetic epitope
TVSSRDSQHL

SEQ ID NO: 52689 - protein, 10 aa, Artificial Sequence
  Description of Artificial Sequence: Synthetic epitope
TVSSTSSLEA

SEQ ID NO: 52690 - protein, 10 aa, Artificial Sequence
  Description of Artificial Sequence: Synthetic epitope
TVSTANVGDI

SEQ ID NO: 52691 - protein, 10 aa, Artificial Sequence
  Description of Artificial Sequence: Synthetic epitope
TVSTNIQVSA

SEQ ID NO: 52692 - protein, 10 aa, Artificial Sequence
  Description of Artificial Sequence: Synthetic epitope
TVSTSTIPLS

SEQ ID NO: 52693 - protein, 10 aa, Artificial Sequence
  Description of Artificial Sequence: Synthetic epitope
TVSVESSEAS

SEQ ID NO: 52694 - protein, 10 aa, Artificial Sequence
  Description of Artificial Sequence: Synthetic epitope
TVTATTKVPE

SEQ ID NO: 52695 - protein, 10 aa, Artificial Sequence
  Description of Artificial Sequence: Synthetic epitope
TVTEQVRQSP

SEQ ID NO: 52696 - protein, 10 aa, Artificial Sequence
  Description of Artificial Sequence: Synthetic epitope
TVTEQVRQSP

SEQ ID NO: 52697 - protein, 10 aa, Artificial Sequence
  Description of Artificial Sequence: Synthetic epitope
TVTGQNSGRQ

SEQ ID NO: 52698 - protein, 10 aa, Artificial Sequence
  Description of Artificial Sequence: Synthetic epitope
TVTKIQSGIT

SEQ ID NO: 52699 - protein, 10 aa, Artificial Sequence
  Description of Artificial Sequence: Synthetic epitope
TVTLQKDSKR

SEQ ID NO: 52700 - protein, 10 aa, Artificial Sequence
  Description of Artificial Sequence: Synthetic epitope
TVTMSTSSVT

SEQ ID NO: 52701 - protein, 10 aa, Artificial Sequence
  Description of Artificial Sequence: Synthetic epitope
TVTNVELLGA

SEQ ID NO: 52702 - protein, 10 aa, Artificial Sequence
  Description of Artificial Sequence: Synthetic epitope
TVTQAILKKE

SEQ ID NO: 52703 - protein, 10 aa, Artificial Sequence
  Description of Artificial Sequence: Synthetic epitope
TVTSAVMMQY

SEQ ID NO: 52704 - protein, 10 aa, Artificial Sequence
  Description of Artificial Sequence: Synthetic epitope
TVTSLKTKVG

SEQ ID NO: 52705 - protein, 10 aa, Artificial Sequence
  Description of Artificial Sequence: Synthetic epitope
TVTSVSRDSP

SEQ ID NO: 52706 - protein, 10 aa, Artificial Sequence
  Description of Artificial Sequence: Synthetic epitope
TVTTSGAKAG

SEQ ID NO: 52707 - protein, 10 aa, Artificial Sequence
  Description of Artificial Sequence: Synthetic epitope
TVTTVLFMNN

SEQ ID NO: 52708 - protein, 10 aa, Artificial Sequence
  Description of Artificial Sequence: Synthetic epitope
TVTTWTIRDK

SEQ ID NO: 52709 - protein, 10 aa, Artificial Sequence
  Description of Artificial Sequence: Synthetic epitope
TVTVKESPTS

SEQ ID NO: 52710 - protein, 10 aa, Artificial Sequence
  Description of Artificial Sequence: Synthetic epitope
TVTVKIIDSD

SEQ ID NO: 52711 - protein, 10 aa, Artificial Sequence
  Description of Artificial Sequence: Synthetic epitope
TVTVKKTVPS

SEQ ID NO: 52712 - protein, 10 aa, Artificial Sequence
  Description of Artificial Sequence: Synthetic epitope
TVVAESKQSS

SEQ ID NO: 52713 - protein, 10 aa, Artificial Sequence
  Description of Artificial Sequence: Synthetic epitope
TVVAESKQSS

SEQ ID NO: 52714 - protein, 10 aa, Artificial Sequence
  Description of Artificial Sequence: Synthetic epitope
TVVALLKGAG

SEQ ID NO: 52715 - protein, 10 aa, Artificial Sequence
  Description of Artificial Sequence: Synthetic epitope
TVVAQTLQVP

SEQ ID NO: 52716 - protein, 10 aa, Artificial Sequence
  Description of Artificial Sequence: Synthetic epitope
TVVEQRVIKT

SEQ ID NO: 52717 - protein, 10 aa, Artificial Sequence
  Description of Artificial Sequence: Synthetic epitope
TVVGDVVSPE

SEQ ID NO: 52718 - protein, 10 aa, Artificial Sequence
  Description of Artificial Sequence: Synthetic epitope
TVVLTRSDKS

SEQ ID NO: 52719 - protein, 10 aa, Artificial Sequence
  Description of Artificial Sequence: Synthetic epitope
TVVNEAKLRL

SEQ ID NO: 52720 - protein, 10 aa, Artificial Sequence
  Description of Artificial Sequence: Synthetic epitope
TVVNTTMSLT

SEQ ID NO: 52721 - protein, 10 aa, Artificial Sequence
  Description of Artificial Sequence: Synthetic epitope
TVVQNTSAGK

SEQ ID NO: 52722 - protein, 10 aa, Artificial Sequence
  Description of Artificial Sequence: Synthetic epitope
TVVQQPIQQP

SEQ ID NO: 52723 - protein, 10 aa, Artificial Sequence
  Description of Artificial Sequence: Synthetic epitope
TVVSSKEVNK

SEQ ID NO: 52724 - protein, 10 aa, Artificial Sequence
  Description of Artificial Sequence: Synthetic epitope
TVVSSLTQEE

SEQ ID NO: 52725 - protein, 10 aa, Artificial Sequence
  Description of Artificial Sequence: Synthetic epitope
TVVTNGSTEL

SEQ ID NO: 52726 - protein, 10 aa, Artificial Sequence
  Description of Artificial Sequence: Synthetic epitope
TVWKAETSRA

SEQ ID NO: 52727 - protein, 10 aa, Artificial Sequence
  Description of Artificial Sequence: Synthetic epitope
TWASSTASHP

SEQ ID NO: 52728 - protein, 10 aa, Artificial Sequence
  Description of Artificial Sequence: Synthetic epitope
TWDEETAAES

SEQ ID NO: 52729 - protein, 10 aa, Artificial Sequence
  Description of Artificial Sequence: Synthetic epitope
TWDEHEASSD

SEQ ID NO: 52730 - protein, 10 aa, Artificial Sequence
  Description of Artificial Sequence: Synthetic epitope
TWETNIRKQS

SEQ ID NO: 52731 - protein, 10 aa, Artificial Sequence
  Description of Artificial Sequence: Synthetic epitope
TWILSSNKDV

SEQ ID NO: 52732 - protein, 10 aa, Artificial Sequence
  Description of Artificial Sequence: Synthetic epitope
TWKKVRRVDQ

SEQ ID NO: 52733 - protein, 10 aa, Artificial Sequence
  Description of Artificial Sequence: Synthetic epitope
TWMATTEKPE

SEQ ID NO: 52734 - protein, 10 aa, Artificial Sequence
  Description of Artificial Sequence: Synthetic epitope
TWNFKIMFHQ

SEQ ID NO: 52735 - protein, 10 aa, Artificial Sequence
  Description of Artificial Sequence: Synthetic epitope
TWSTAESGAE

SEQ ID NO: 52736 - protein, 10 aa, Artificial Sequence
  Description of Artificial Sequence: Synthetic epitope
TWTGAEHINQ

SEQ ID NO: 52737 - protein, 10 aa, Artificial Sequence
  Description of Artificial Sequence: Synthetic epitope
TWTTKAKERA

SEQ ID NO: 52738 - protein, 10 aa, Artificial Sequence
  Description of Artificial Sequence: Synthetic epitope
TWVQDQLDDE

SEQ ID NO: 52739 - protein, 10 aa, Artificial Sequence
  Description of Artificial Sequence: Synthetic epitope
TWVQDQLDDE

SEQ ID NO: 52740 - protein, 10 aa, Artificial Sequence
  Description of Artificial Sequence: Synthetic epitope
TWWQKKPQMD

SEQ ID NO: 52741 - protein, 10 aa, Artificial Sequence
  Description of Artificial Sequence: Synthetic epitope
TYAPKISAGT

SEQ ID NO: 52742 - protein, 10 aa, Artificial Sequence
  Description of Artificial Sequence: Synthetic epitope
TYDETTSDEE

SEQ ID NO: 52743 - protein, 10 aa, Artificial Sequence
  Description of Artificial Sequence: Synthetic epitope
TYEANEVTDS

SEQ ID NO: 52744 - protein, 10 aa, Artificial Sequence
  Description of Artificial Sequence: Synthetic epitope
TYEEKLKLVA

SEQ ID NO: 52745 - protein, 10 aa, Artificial Sequence
  Description of Artificial Sequence: Synthetic epitope
TYEIVLWQPV

SEQ ID NO: 52746 - protein, 10 aa, Artificial Sequence
  Description of Artificial Sequence: Synthetic epitope
TYEKMESADQ

SEQ ID NO: 52747 - protein, 10 aa, Artificial Sequence
  Description of Artificial Sequence: Synthetic epitope
TYEQSSVDRS

SEQ ID NO: 52748 - protein, 10 aa, Artificial Sequence
  Description of Artificial Sequence: Synthetic epitope
TYESMEAMLE

SEQ ID NO: 52749 - protein, 10 aa, Artificial Sequence
  Description of Artificial Sequence: Synthetic epitope
TYFALNRTPQ

SEQ ID NO: 52750 - protein, 10 aa, Artificial Sequence
  Description of Artificial Sequence: Synthetic epitope
TYIENSNETA

SEQ ID NO: 52751 - protein, 10 aa, Artificial Sequence
  Description of Artificial Sequence: Synthetic epitope
TYIESASELR

SEQ ID NO: 52752 - protein, 10 aa, Artificial Sequence
  Description of Artificial Sequence: Synthetic epitope
TYITFQTWKH

SEQ ID NO: 52753 - protein, 10 aa, Artificial Sequence
  Description of Artificial Sequence: Synthetic epitope
TYKAQDAKTS

SEQ ID NO: 52754 - protein, 10 aa, Artificial Sequence
  Description of Artificial Sequence: Synthetic epitope
TYKHLFLEKM

SEQ ID NO: 52755 - protein, 10 aa, Artificial Sequence
  Description of Artificial Sequence: Synthetic epitope
TYKIPRQRIM

SEQ ID NO: 52756 - protein, 10 aa, Artificial Sequence
  Description of Artificial Sequence: Synthetic epitope
TYKMEKVYST

SEQ ID NO: 52757 - protein, 10 aa, Artificial Sequence
  Description of Artificial Sequence: Synthetic epitope
TYKTIGNRKK

SEQ ID NO: 52758 - protein, 10 aa, Artificial Sequence
  Description of Artificial Sequence: Synthetic epitope
TYKVLTLVSQ

SEQ ID NO: 52759 - protein, 10 aa, Artificial Sequence
  Description of Artificial Sequence: Synthetic epitope
TYLGAKMTRK

SEQ ID NO: 52760 - protein, 10 aa, Artificial Sequence
  Description of Artificial Sequence: Synthetic epitope
TYLRLQSQRD

SEQ ID NO: 52761 - protein, 10 aa, Artificial Sequence
  Description of Artificial Sequence: Synthetic epitope
TYLVSERLER

SEQ ID NO: 52762 - protein, 10 aa, Artificial Sequence
  Description of Artificial Sequence: Synthetic epitope
TYMLLKFAKL

SEQ ID NO: 52763 - protein, 10 aa, Artificial Sequence
  Description of Artificial Sequence: Synthetic epitope
TYMSPAKLGE

SEQ ID NO: 52764 - protein, 10 aa, Artificial Sequence
  Description of Artificial Sequence: Synthetic epitope
TYNQQLIIPS

SEQ ID NO: 52765 - protein, 10 aa, Artificial Sequence
  Description of Artificial Sequence: Synthetic epitope
TYQSITERIT

SEQ ID NO: 52766 - protein, 10 aa, Artificial Sequence
  Description of Artificial Sequence: Synthetic epitope
TYREKLTSKE

SEQ ID NO: 52767 - protein, 10 aa, Artificial Sequence
  Description of Artificial Sequence: Synthetic epitope
TYRSQLSSEE

SEQ ID NO: 52768 - protein, 10 aa, Artificial Sequence
  Description of Artificial Sequence: Synthetic epitope
TYRSSQMESQ

SEQ ID NO: 52769 - protein, 10 aa, Artificial Sequence
  Description of Artificial Sequence: Synthetic epitope
TYSKAQNQKK

SEQ ID NO: 52770 - protein, 10 aa, Artificial Sequence
  Description of Artificial Sequence: Synthetic epitope
TYSLANIKET

SEQ ID NO: 52771 - protein, 10 aa, Artificial Sequence
  Description of Artificial Sequence: Synthetic epitope
TYSPKLERKT

SEQ ID NO: 52772 - protein, 10 aa, Artificial Sequence
  Description of Artificial Sequence: Synthetic epitope
TYSSKVSAKH

SEQ ID NO: 52773 - protein, 10 aa, Artificial Sequence
  Description of Artificial Sequence: Synthetic epitope
TYSSNHHLQQ

SEQ ID NO: 52774 - protein, 10 aa, Artificial Sequence
  Description of Artificial Sequence: Synthetic epitope
TYSSQTTAIL

SEQ ID NO: 52775 - protein, 10 aa, Artificial Sequence
  Description of Artificial Sequence: Synthetic epitope
TYTIEDIVIE

SEQ ID NO: 52776 - protein, 10 aa, Artificial Sequence
  Description of Artificial Sequence: Synthetic epitope
TYTLEKKEAM

SEQ ID NO: 52777 - protein, 10 aa, Artificial Sequence
  Description of Artificial Sequence: Synthetic epitope
TYTTDDSPSD

SEQ ID NO: 52778 - protein, 10 aa, Artificial Sequence
  Description of Artificial Sequence: Synthetic epitope
TYVNSQATGE

SEQ ID NO: 52779 - protein, 10 aa, Artificial Sequence
  Description of Artificial Sequence: Synthetic epitope
TYVQPRRKQR

SEQ ID NO: 52780 - protein, 10 aa, Artificial Sequence
  Description of Artificial Sequence: Synthetic epitope
TYVVQKQFMR

SEQ ID NO: 52781 - protein, 10 aa, Artificial Sequence
  Description of Artificial Sequence: Synthetic epitope
SKNQAKKSES

SEQ ID NO: 52782 - protein, 10 aa, Artificial Sequence
  Description of Artificial Sequence: Synthetic epitope
VAAEKKDEGP

SEQ ID NO: 52783 - protein, 10 aa, Artificial Sequence
  Description of Artificial Sequence: Synthetic epitope
VAAGTSKSEE

SEQ ID NO: 52784 - protein, 10 aa, Artificial Sequence
  Description of Artificial Sequence: Synthetic epitope
VAAHASLNPA

SEQ ID NO: 52785 - protein, 10 aa, Artificial Sequence
  Description of Artificial Sequence: Synthetic epitope
VAAKKVGTEI

SEQ ID NO: 52786 - protein, 10 aa, Artificial Sequence
  Description of Artificial Sequence: Synthetic epitope
VAAKPVATKM

SEQ ID NO: 52787 - protein, 10 aa, Artificial Sequence
  Description of Artificial Sequence: Synthetic epitope
VAALNKAEER

SEQ ID NO: 52788 - protein, 10 aa, Artificial Sequence
  Description of Artificial Sequence: Synthetic epitope
VAALRASVET

SEQ ID NO: 52789 - protein, 10 aa, Artificial Sequence
  Description of Artificial Sequence: Synthetic epitope
VAALSKAEER

SEQ ID NO: 52790 - protein, 10 aa, Artificial Sequence
  Description of Artificial Sequence: Synthetic epitope
VAAMSVMNGK

SEQ ID NO: 52791 - protein, 10 aa, Artificial Sequence
  Description of Artificial Sequence: Synthetic epitope
VAAQKSEAAF

SEQ ID NO: 52792 - protein, 10 aa, Artificial Sequence
  Description of Artificial Sequence: Synthetic epitope
VAAQPTATSP

SEQ ID NO: 52793 - protein, 10 aa, Artificial Sequence
  Description of Artificial Sequence: Synthetic epitope
VAARQAYKTM

SEQ ID NO: 52794 - protein, 10 aa, Artificial Sequence
  Description of Artificial Sequence: Synthetic epitope
VAASQEMQQG

SEQ ID NO: 52795 - protein, 10 aa, Artificial Sequence
  Description of Artificial Sequence: Synthetic epitope
VAAVTLAKAE

SEQ ID NO: 52796 - protein, 10 aa, Artificial Sequence
  Description of Artificial Sequence: Synthetic epitope
VADFSSAQAQ

SEQ ID NO: 52797 - protein, 10 aa, Artificial Sequence
  Description of Artificial Sequence: Synthetic epitope
VADREASLEL

SEQ ID NO: 52798 - protein, 10 aa, Artificial Sequence
  Description of Artificial Sequence: Synthetic epitope
VADSLSLLKK

SEQ ID NO: 52799 - protein, 10 aa, Artificial Sequence
  Description of Artificial Sequence: Synthetic epitope
VAEAGNSSIQ

SEQ ID NO: 52800 - protein, 10 aa, Artificial Sequence
  Description of Artificial Sequence: Synthetic epitope
VAEAQRAEFS

SEQ ID NO: 52801 - protein, 10 aa, Artificial Sequence
  Description of Artificial Sequence: Synthetic epitope
VAEDTSDHRR

SEQ ID NO: 52802 - protein, 10 aa, Artificial Sequence
  Description of Artificial Sequence: Synthetic epitope
VAEGVRLSPE

SEQ ID NO: 52803 - protein, 10 aa, Artificial Sequence
  Description of Artificial Sequence: Synthetic epitope
VAEHAAKQKQ

SEQ ID NO: 52804 - protein, 10 aa, Artificial Sequence
  Description of Artificial Sequence: Synthetic epitope
VAEHQVAPAR

SEQ ID NO: 52805 - protein, 10 aa, Artificial Sequence
  Description of Artificial Sequence: Synthetic epitope
VAESQRLVDE

SEQ ID NO: 52806 - protein, 10 aa, Artificial Sequence
  Description of Artificial Sequence: Synthetic epitope
VAETSAMSDV

SEQ ID NO: 52807 - protein, 10 aa, Artificial Sequence
  Description of Artificial Sequence: Synthetic epitope
VAEVVETMED

SEQ ID NO: 52808 - protein, 10 aa, Artificial Sequence
  Description of Artificial Sequence: Synthetic epitope
VAFKSKTLEF

SEQ ID NO: 52809 - protein, 10 aa, Artificial Sequence
  Description of Artificial Sequence: Synthetic epitope
VAFLAQKKDK

SEQ ID NO: 52810 - protein, 10 aa, Artificial Sequence
  Description of Artificial Sequence: Synthetic epitope
VAFLTSAVAS

SEQ ID NO: 52811 - protein, 10 aa, Artificial Sequence
  Description of Artificial Sequence: Synthetic epitope
VAGAQIQGAK

SEQ ID NO: 52812 - protein, 10 aa, Artificial Sequence
  Description of Artificial Sequence: Synthetic epitope
VAGATSIARR

SEQ ID NO: 52813 - protein, 10 aa, Artificial Sequence
  Description of Artificial Sequence: Synthetic epitope
VAGAWAMWEA

SEQ ID NO: 52814 - protein, 10 aa, Artificial Sequence
  Description of Artificial Sequence: Synthetic epitope
VAGDSAFSRA

SEQ ID NO: 52815 - protein, 10 aa, Artificial Sequence
  Description of Artificial Sequence: Synthetic epitope
VAGESAEPEP

SEQ ID NO: 52816 - protein, 10 aa, Artificial Sequence
  Description of Artificial Sequence: Synthetic epitope
VAGINQLMTL

SEQ ID NO: 52817 - protein, 10 aa, Artificial Sequence
  Description of Artificial Sequence: Synthetic epitope
VAGKAIVMFE

SEQ ID NO: 52818 - protein, 10 aa, Artificial Sequence
  Description of Artificial Sequence: Synthetic epitope
VAGKDKSPKK

SEQ ID NO: 52819 - protein, 10 aa, Artificial Sequence
  Description of Artificial Sequence: Synthetic epitope
VAGKETTNIF

SEQ ID NO: 52820 - protein, 10 aa, Artificial Sequence
  Description of Artificial Sequence: Synthetic epitope
VAGKTKLLAI

SEQ ID NO: 52821 - protein, 10 aa, Artificial Sequence
  Description of Artificial Sequence: Synthetic epitope
VAHEVARMRA

SEQ ID NO: 52822 - protein, 10 aa, Artificial Sequence
  Description of Artificial Sequence: Synthetic epitope
VAHLEMIEGD

SEQ ID NO: 52823 - protein, 10 aa, Artificial Sequence
  Description of Artificial Sequence: Synthetic epitope
VAIEHTKIFP

SEQ ID NO: 52824 - protein, 10 aa, Artificial Sequence
  Description of Artificial Sequence: Synthetic epitope
VAIREAYEAG

SEQ ID NO: 52825 - protein, 10 aa, Artificial Sequence
  Description of Artificial Sequence: Synthetic epitope
VAISMLASKS

SEQ ID NO: 52826 - protein, 10 aa, Artificial Sequence
  Description of Artificial Sequence: Synthetic epitope
VAKADKLAEE

SEQ ID NO: 52827 - protein, 10 aa, Artificial Sequence
  Description of Artificial Sequence: Synthetic epitope
VAKAKKLDEA

SEQ ID NO: 52828 - protein, 10 aa, Artificial Sequence
  Description of Artificial Sequence: Synthetic epitope
VAKANAMGFA

SEQ ID NO: 52829 - protein, 10 aa, Artificial Sequence
  Description of Artificial Sequence: Synthetic epitope
VAKEARPAFL

SEQ ID NO: 52830 - protein, 10 aa, Artificial Sequence
  Description of Artificial Sequence: Synthetic epitope
VAKEESVDDK

SEQ ID NO: 52831 - protein, 10 aa, Artificial Sequence
  Description of Artificial Sequence: Synthetic epitope
VAKESSLASS

SEQ ID NO: 52832 - protein, 10 aa, Artificial Sequence
  Description of Artificial Sequence: Synthetic epitope
VAKETSESTR

SEQ ID NO: 52833 - protein, 10 aa, Artificial Sequence
  Description of Artificial Sequence: Synthetic epitope
VAKFRAASNH

SEQ ID NO: 52834 - protein, 10 aa, Artificial Sequence
  Description of Artificial Sequence: Synthetic epitope
VAKFSAIASQ

SEQ ID NO: 52835 - protein, 10 aa, Artificial Sequence
  Description of Artificial Sequence: Synthetic epitope
VAKKRVISDK

SEQ ID NO: 52836 - protein, 10 aa, Artificial Sequence
  Description of Artificial Sequence: Synthetic epitope
VAKKSGKMAM

SEQ ID NO: 52837 - protein, 10 aa, Artificial Sequence
  Description of Artificial Sequence: Synthetic epitope
VAKKTKDVTV

SEQ ID NO: 52838 - protein, 10 aa, Artificial Sequence
  Description of Artificial Sequence: Synthetic epitope
VAKMMTTEMI

SEQ ID NO: 52839 - protein, 10 aa, Artificial Sequence
  Description of Artificial Sequence: Synthetic epitope
VAKQVKARLR

SEQ ID NO: 52840 - protein, 10 aa, Artificial Sequence
  Description of Artificial Sequence: Synthetic epitope
VAKSKKVPLS

SEQ ID NO: 52841 - protein, 10 aa, Artificial Sequence
  Description of Artificial Sequence: Synthetic epitope
VAKTRAKAKA

SEQ ID NO: 52842 - protein, 10 aa, Artificial Sequence
  Description of Artificial Sequence: Synthetic epitope
VAKVMSVGDR

SEQ ID NO: 52843 - protein, 10 aa, Artificial Sequence
  Description of Artificial Sequence: Synthetic epitope
VALAGTVAIL

SEQ ID NO: 52844 - protein, 10 aa, Artificial Sequence
  Description of Artificial Sequence: Synthetic epitope
VALDKQNKHT

SEQ ID NO: 52845 - protein, 10 aa, Artificial Sequence
  Description of Artificial Sequence: Synthetic epitope
VALLQSAKER

SEQ ID NO: 52846 - protein, 10 aa, Artificial Sequence
  Description of Artificial Sequence: Synthetic epitope
VALMEASLTY

SEQ ID NO: 52847 - protein, 10 aa, Artificial Sequence
  Description of Artificial Sequence: Synthetic epitope
VALNSHKSEK

SEQ ID NO: 52848 - protein, 10 aa, Artificial Sequence
  Description of Artificial Sequence: Synthetic epitope
VALRGKKQKE

SEQ ID NO: 52849 - protein, 10 aa, Artificial Sequence
  Description of Artificial Sequence: Synthetic epitope
VALSSETEVA

SEQ ID NO: 52850 - protein, 10 aa, Artificial Sequence
  Description of Artificial Sequence: Synthetic epitope
VAMADDSLWK

SEQ ID NO: 52851 - protein, 10 aa, Artificial Sequence
  Description of Artificial Sequence: Synthetic epitope
VAMASQRQAK

SEQ ID NO: 52852 - protein, 10 aa, Artificial Sequence
  Description of Artificial Sequence: Synthetic epitope
VAMLRMTEDH

SEQ ID NO: 52853 - protein, 10 aa, Artificial Sequence
  Description of Artificial Sequence: Synthetic epitope
VAMRGNSDYA

SEQ ID NO: 52854 - protein, 10 aa, Artificial Sequence
  Description of Artificial Sequence: Synthetic epitope
VAMTRSVEVH

SEQ ID NO: 52855 - protein, 10 aa, Artificial Sequence
  Description of Artificial Sequence: Synthetic epitope
VANAEATNGK

SEQ ID NO: 52856 - protein, 10 aa, Artificial Sequence
  Description of Artificial Sequence: Synthetic epitope
VANEYKSVTE

SEQ ID NO: 52857 - protein, 10 aa, Artificial Sequence
  Description of Artificial Sequence: Synthetic epitope
VANKFAKATG

SEQ ID NO: 52858 - protein, 10 aa, Artificial Sequence
  Description of Artificial Sequence: Synthetic epitope
VANSEVSTLS

SEQ ID NO: 52859 - protein, 10 aa, Artificial Sequence
  Description of Artificial Sequence: Synthetic epitope
VANSFQSQSD

SEQ ID NO: 52860 - protein, 10 aa, Artificial Sequence
  Description of Artificial Sequence: Synthetic epitope
VANSKVNATM

SEQ ID NO: 52861 - protein, 10 aa, Artificial Sequence
  Description of Artificial Sequence: Synthetic epitope
VANSRSMSLS

SEQ ID NO: 52862 - protein, 10 aa, Artificial Sequence
  Description of Artificial Sequence: Synthetic epitope
VAPAGRLVTI

SEQ ID NO: 52863 - protein, 10 aa, Artificial Sequence
  Description of Artificial Sequence: Synthetic epitope
VAPNTEANSF

SEQ ID NO: 52864 - protein, 10 aa, Artificial Sequence
  Description of Artificial Sequence: Synthetic epitope
VAPQEKQVHK

SEQ ID NO: 52865 - protein, 10 aa, Artificial Sequence
  Description of Artificial Sequence: Synthetic epitope
VAPSSALASS

SEQ ID NO: 52866 - protein, 10 aa, Artificial Sequence
  Description of Artificial Sequence: Synthetic epitope
VAPYKIERGK

SEQ ID NO: 52867 - protein, 10 aa, Artificial Sequence
  Description of Artificial Sequence: Synthetic epitope
VAQALELSRK

SEQ ID NO: 52868 - protein, 10 aa, Artificial Sequence
  Description of Artificial Sequence: Synthetic epitope
VAQVNYSAVA

SEQ ID NO: 52869 - protein, 10 aa, Artificial Sequence
  Description of Artificial Sequence: Synthetic epitope
VARARAAEHT

SEQ ID NO: 52870 - protein, 10 aa, Artificial Sequence
  Description of Artificial Sequence: Synthetic epitope
VARAYPSMMG

SEQ ID NO: 52871 - protein, 10 aa, Artificial Sequence
  Description of Artificial Sequence: Synthetic epitope
VARGKLATAT

SEQ ID NO: 52872 - protein, 10 aa, Artificial Sequence
  Description of Artificial Sequence: Synthetic epitope
VARLLSEVQP

SEQ ID NO: 52873 - protein, 10 aa, Artificial Sequence
  Description of Artificial Sequence: Synthetic epitope
VARRALAAQL

SEQ ID NO: 52874 - protein, 10 aa, Artificial Sequence
  Description of Artificial Sequence: Synthetic epitope
VARRALAAQL

SEQ ID NO: 52875 - protein, 10 aa, Artificial Sequence
  Description of Artificial Sequence: Synthetic epitope
VARRQQERKA

SEQ ID NO: 52876 - protein, 10 aa, Artificial Sequence
  Description of Artificial Sequence: Synthetic epitope
VARVRASSRV

SEQ ID NO: 52877 - protein, 10 aa, Artificial Sequence
  Description of Artificial Sequence: Synthetic epitope
VASADGEQAR

SEQ ID NO: 52878 - protein, 10 aa, Artificial Sequence
  Description of Artificial Sequence: Synthetic epitope
VASASTTRRT

SEQ ID NO: 52879 - protein, 10 aa, Artificial Sequence
  Description of Artificial Sequence: Synthetic epitope
VASDMTLTAL

SEQ ID NO: 52880 - protein, 10 aa, Artificial Sequence
  Description of Artificial Sequence: Synthetic epitope
VASEFVSSLQ

SEQ ID NO: 52881 - protein, 10 aa, Artificial Sequence
  Description of Artificial Sequence: Synthetic epitope
VASGELMSSK

SEQ ID NO: 52882 - protein, 10 aa, Artificial Sequence
  Description of Artificial Sequence: Synthetic epitope
VASKASAEGG

SEQ ID NO: 52883 - protein, 10 aa, Artificial Sequence
  Description of Artificial Sequence: Synthetic epitope
VASKLSSKSE

SEQ ID NO: 52884 - protein, 10 aa, Artificial Sequence
  Description of Artificial Sequence: Synthetic epitope
VASLVGRSKT

SEQ ID NO: 52885 - protein, 10 aa, Artificial Sequence
  Description of Artificial Sequence: Synthetic epitope
VASMTKPTTI

SEQ ID NO: 52886 - protein, 10 aa, Artificial Sequence
  Description of Artificial Sequence: Synthetic epitope
VASQAAVPTQ

SEQ ID NO: 52887 - protein, 10 aa, Artificial Sequence
  Description of Artificial Sequence: Synthetic epitope
VASQLIISER

SEQ ID NO: 52888 - protein, 10 aa, Artificial Sequence
  Description of Artificial Sequence: Synthetic epitope
VASQSDSKQR

SEQ ID NO: 52889 - protein, 10 aa, Artificial Sequence
  Description of Artificial Sequence: Synthetic epitope
VASRAQVSLI

SEQ ID NO: 52890 - protein, 10 aa, Artificial Sequence
  Description of Artificial Sequence: Synthetic epitope
VASRATVLQK

SEQ ID NO: 52891 - protein, 10 aa, Artificial Sequence
  Description of Artificial Sequence: Synthetic epitope
VASRVSYKEE

SEQ ID NO: 52892 - protein, 10 aa, Artificial Sequence
  Description of Artificial Sequence: Synthetic epitope
VASSESDPAL

SEQ ID NO: 52893 - protein, 10 aa, Artificial Sequence
  Description of Artificial Sequence: Synthetic epitope
VASSLASSAG

SEQ ID NO: 52894 - protein, 10 aa, Artificial Sequence
  Description of Artificial Sequence: Synthetic epitope
VASSTNLLTD

SEQ ID NO: 52895 - protein, 10 aa, Artificial Sequence
  Description of Artificial Sequence: Synthetic epitope
VASSVVKQKL

SEQ ID NO: 52896 - protein, 10 aa, Artificial Sequence
  Description of Artificial Sequence: Synthetic epitope
VASTKSGQEQ

SEQ ID NO: 52897 - protein, 10 aa, Artificial Sequence
  Description of Artificial Sequence: Synthetic epitope
VASTRELKLQ

SEQ ID NO: 52898 - protein, 10 aa, Artificial Sequence
  Description of Artificial Sequence: Synthetic epitope
VASTSASGLS

SEQ ID NO: 52899 - protein, 10 aa, Artificial Sequence
  Description of Artificial Sequence: Synthetic epitope
VASYEAYEDL

SEQ ID NO: 52900 - protein, 10 aa, Artificial Sequence
  Description of Artificial Sequence: Synthetic epitope
VATDLRKDKA

SEQ ID NO: 52901 - protein, 10 aa, Artificial Sequence
  Description of Artificial Sequence: Synthetic epitope
VATETQLKGG

SEQ ID NO: 52902 - protein, 10 aa, Artificial Sequence
  Description of Artificial Sequence: Synthetic epitope
VATKIDKVDT

SEQ ID NO: 52903 - protein, 10 aa, Artificial Sequence
  Description of Artificial Sequence: Synthetic epitope
VATKSIRPRY

SEQ ID NO: 52904 - protein, 10 aa, Artificial Sequence
  Description of Artificial Sequence: Synthetic epitope
VATKTKATGA

SEQ ID NO: 52905 - protein, 10 aa, Artificial Sequence
  Description of Artificial Sequence: Synthetic epitope
VATNTLSKAA

SEQ ID NO: 52906 - protein, 10 aa, Artificial Sequence
  Description of Artificial Sequence: Synthetic epitope
VATPMSVTSQ

SEQ ID NO: 52907 - protein, 10 aa, Artificial Sequence
  Description of Artificial Sequence: Synthetic epitope
VATRRSLGYA

SEQ ID NO: 52908 - protein, 10 aa, Artificial Sequence
  Description of Artificial Sequence: Synthetic epitope
VATSTATAKP

SEQ ID NO: 52909 - protein, 10 aa, Artificial Sequence
  Description of Artificial Sequence: Synthetic epitope
VATTDTLEST

SEQ ID NO: 52910 - protein, 10 aa, Artificial Sequence
  Description of Artificial Sequence: Synthetic epitope
VATVQLPQQD

SEQ ID NO: 52911 - protein, 10 aa, Artificial Sequence
  Description of Artificial Sequence: Synthetic epitope
VATVSATRAQ

SEQ ID NO: 52912 - protein, 10 aa, Artificial Sequence
  Description of Artificial Sequence: Synthetic epitope
VATVYAPALS

SEQ ID NO: 52913 - protein, 10 aa, Artificial Sequence
  Description of Artificial Sequence: Synthetic epitope
VAVAQAKERE

SEQ ID NO: 52914 - protein, 10 aa, Artificial Sequence
  Description of Artificial Sequence: Synthetic epitope
VAVFSLQKLR

SEQ ID NO: 52915 - protein, 10 aa, Artificial Sequence
  Description of Artificial Sequence: Synthetic epitope
VAVREALEKP

SEQ ID NO: 52916 - protein, 10 aa, Artificial Sequence
  Description of Artificial Sequence: Synthetic epitope
VAWVGTAQAG

SEQ ID NO: 52917 - protein, 10 aa, Artificial Sequence
  Description of Artificial Sequence: Synthetic epitope
VCTAFTAEHA

SEQ ID NO: 52918 - protein, 10 aa, Artificial Sequence
  Description of Artificial Sequence: Synthetic epitope
VDAAIYASIH

SEQ ID NO: 52919 - protein, 10 aa, Artificial Sequence
  Description of Artificial Sequence: Synthetic epitope
VDAHKATNKS

SEQ ID NO: 52920 - protein, 10 aa, Artificial Sequence
  Description of Artificial Sequence: Synthetic epitope
VDALKMAAQE

SEQ ID NO: 52921 - protein, 10 aa, Artificial Sequence
  Description of Artificial Sequence: Synthetic epitope
VDALRVEDMM

SEQ ID NO: 52922 - protein, 10 aa, Artificial Sequence
  Description of Artificial Sequence: Synthetic epitope
VDANTKLTRS

SEQ ID NO: 52923 - protein, 10 aa, Artificial Sequence
  Description of Artificial Sequence: Synthetic epitope
VDARTASSGS

SEQ ID NO: 52924 - protein, 10 aa, Artificial Sequence
  Description of Artificial Sequence: Synthetic epitope
VDDETKGVEG

SEQ ID NO: 52925 - protein, 10 aa, Artificial Sequence
  Description of Artificial Sequence: Synthetic epitope
VDDGTNQINE

SEQ ID NO: 52926 - protein, 10 aa, Artificial Sequence
  Description of Artificial Sequence: Synthetic epitope
VDEEAEAKML

SEQ ID NO: 52927 - protein, 10 aa, Artificial Sequence
  Description of Artificial Sequence: Synthetic epitope
VDEFLKVSSK

SEQ ID NO: 52928 - protein, 10 aa, Artificial Sequence
  Description of Artificial Sequence: Synthetic epitope
VDEIVKSGYI

SEQ ID NO: 52929 - protein, 10 aa, Artificial Sequence
  Description of Artificial Sequence: Synthetic epitope
VDFSVKSQAD

SEQ ID NO: 52930 - protein, 10 aa, Artificial Sequence
  Description of Artificial Sequence: Synthetic epitope
VDGELATVRA

SEQ ID NO: 52931 - protein, 10 aa, Artificial Sequence
  Description of Artificial Sequence: Synthetic epitope
VDGVDEVAKK

SEQ ID NO: 52932 - protein, 10 aa, Artificial Sequence
  Description of Artificial Sequence: Synthetic epitope
VDHGKIEYEP

SEQ ID NO: 52933 - protein, 10 aa, Artificial Sequence
  Description of Artificial Sequence: Synthetic epitope
VDISFSKQLL

SEQ ID NO: 52934 - protein, 10 aa, Artificial Sequence
  Description of Artificial Sequence: Synthetic epitope
VDISQTAATV

SEQ ID NO: 52935 - protein, 10 aa, Artificial Sequence
  Description of Artificial Sequence: Synthetic epitope
VDISTAMSER

SEQ ID NO: 52936 - protein, 10 aa, Artificial Sequence
  Description of Artificial Sequence: Synthetic epitope
VDITRLEKNA

SEQ ID NO: 52937 - protein, 10 aa, Artificial Sequence
  Description of Artificial Sequence: Synthetic epitope
VDKSRSREVY

SEQ ID NO: 52938 - protein, 10 aa, Artificial Sequence
  Description of Artificial Sequence: Synthetic epitope
VDLEKELQSA

SEQ ID NO: 52939 - protein, 10 aa, Artificial Sequence
  Description of Artificial Sequence: Synthetic epitope
VDLESAVKPE

SEQ ID NO: 52940 - protein, 10 aa, Artificial Sequence
  Description of Artificial Sequence: Synthetic epitope
VDLILLFREL

SEQ ID NO: 52941 - protein, 10 aa, Artificial Sequence
  Description of Artificial Sequence: Synthetic epitope
VDLLAKAEEQ

SEQ ID NO: 52942 - protein, 10 aa, Artificial Sequence
  Description of Artificial Sequence: Synthetic epitope
VDLLVKISSE

SEQ ID NO: 52943 - protein, 10 aa, Artificial Sequence
  Description of Artificial Sequence: Synthetic epitope
VDLRVKQYYE

SEQ ID NO: 52944 - protein, 10 aa, Artificial Sequence
  Description of Artificial Sequence: Synthetic epitope
VDMEEMGTGR

SEQ ID NO: 52945 - protein, 10 aa, Artificial Sequence
  Description of Artificial Sequence: Synthetic epitope
VDMKLSLEVS

SEQ ID NO: 52946 - protein, 10 aa, Artificial Sequence
  Description of Artificial Sequence: Synthetic epitope
VDMSRQILTL

SEQ ID NO: 52947 - protein, 10 aa, Artificial Sequence
  Description of Artificial Sequence: Synthetic epitope
VDMTLAVATE

SEQ ID NO: 52948 - protein, 10 aa, Artificial Sequence
  Description of Artificial Sequence: Synthetic epitope
VDNENTVTIS

SEQ ID NO: 52949 - protein, 10 aa, Artificial Sequence
  Description of Artificial Sequence: Synthetic epitope
VDNLSSLTSE

SEQ ID NO: 52950 - protein, 10 aa, Artificial Sequence
  Description of Artificial Sequence: Synthetic epitope
VDPAQTVEQR

SEQ ID NO: 52951 - protein, 10 aa, Artificial Sequence
  Description of Artificial Sequence: Synthetic epitope
VDQDTTSFDS

SEQ ID NO: 52952 - protein, 10 aa, Artificial Sequence
  Description of Artificial Sequence: Synthetic epitope
VDQELSKENE

SEQ ID NO: 52953 - protein, 10 aa, Artificial Sequence
  Description of Artificial Sequence: Synthetic epitope
VDQRQVKTVR

SEQ ID NO: 52954 - protein, 10 aa, Artificial Sequence
  Description of Artificial Sequence: Synthetic epitope
VDQRSTSAPS

SEQ ID NO: 52955 - protein, 10 aa, Artificial Sequence
  Description of Artificial Sequence: Synthetic epitope
VDRQAKLNQP

SEQ ID NO: 52956 - protein, 10 aa, Artificial Sequence
  Description of Artificial Sequence: Synthetic epitope
VDRSLLKLKM

SEQ ID NO: 52957 - protein, 10 aa, Artificial Sequence
  Description of Artificial Sequence: Synthetic epitope
VDRTAADHQT

SEQ ID NO: 52958 - protein, 10 aa, Artificial Sequence
  Description of Artificial Sequence: Synthetic epitope
VDSAKSLEDG

SEQ ID NO: 52959 - protein, 10 aa, Artificial Sequence
  Description of Artificial Sequence: Synthetic epitope
VDSDLKSTRE

SEQ ID NO: 52960 - protein, 10 aa, Artificial Sequence
  Description of Artificial Sequence: Synthetic epitope
VDSEMMSNPP

SEQ ID NO: 52961 - protein, 10 aa, Artificial Sequence
  Description of Artificial Sequence: Synthetic epitope
VDSETNIEAS

SEQ ID NO: 52962 - protein, 10 aa, Artificial Sequence
  Description of Artificial Sequence: Synthetic epitope
VDSIVSSETP

SEQ ID NO: 52963 - protein, 10 aa, Artificial Sequence
  Description of Artificial Sequence: Synthetic epitope
VDSKTDKTAD

SEQ ID NO: 52964 - protein, 10 aa, Artificial Sequence
  Description of Artificial Sequence: Synthetic epitope
VDSKVRKDVG

SEQ ID NO: 52965 - protein, 10 aa, Artificial Sequence
  Description of Artificial Sequence: Synthetic epitope
VDSSAVDNVA

SEQ ID NO: 52966 - protein, 10 aa, Artificial Sequence
  Description of Artificial Sequence: Synthetic epitope
VDSSEEVSEE

SEQ ID NO: 52967 - protein, 10 aa, Artificial Sequence
  Description of Artificial Sequence: Synthetic epitope
VDSSISNRQS

SEQ ID NO: 52968 - protein, 10 aa, Artificial Sequence
  Description of Artificial Sequence: Synthetic epitope
VDSVEAEAEE

SEQ ID NO: 52969 - protein, 10 aa, Artificial Sequence
  Description of Artificial Sequence: Synthetic epitope
VDSVSQFNNS

SEQ ID NO: 52970 - protein, 10 aa, Artificial Sequence
  Description of Artificial Sequence: Synthetic epitope
VDSVTVGAEE

SEQ ID NO: 52971 - protein, 10 aa, Artificial Sequence
  Description of Artificial Sequence: Synthetic epitope
VDTAVLLGAN

SEQ ID NO: 52972 - protein, 10 aa, Artificial Sequence
  Description of Artificial Sequence: Synthetic epitope
VDTETEVTQY

SEQ ID NO: 52973 - protein, 10 aa, Artificial Sequence
  Description of Artificial Sequence: Synthetic epitope
VDTMAQKTQA

SEQ ID NO: 52974 - protein, 10 aa, Artificial Sequence
  Description of Artificial Sequence: Synthetic epitope
VDTQRTKGQD

SEQ ID NO: 52975 - protein, 10 aa, Artificial Sequence
  Description of Artificial Sequence: Synthetic epitope
VDVFAGVSLS

SEQ ID NO: 52976 - protein, 10 aa, Artificial Sequence
  Description of Artificial Sequence: Synthetic epitope
VDVKKRIIRE

SEQ ID NO: 52977 - protein, 10 aa, Artificial Sequence
  Description of Artificial Sequence: Synthetic epitope
VDVKMAILQI

SEQ ID NO: 52978 - protein, 10 aa, Artificial Sequence
  Description of Artificial Sequence: Synthetic epitope
VDVSARAEVR

SEQ ID NO: 52979 - protein, 10 aa, Artificial Sequence
  Description of Artificial Sequence: Synthetic epitope
VDVSTMHRRE

SEQ ID NO: 52980 - protein, 10 aa, Artificial Sequence
  Description of Artificial Sequence: Synthetic epitope
VDVVTVSFSL

SEQ ID NO: 52981 - protein, 10 aa, Artificial Sequence
  Description of Artificial Sequence: Synthetic epitope
VDWNSILLEL

SEQ ID NO: 52982 - protein, 10 aa, Artificial Sequence
  Description of Artificial Sequence: Synthetic epitope
VDWTLRLNTI

SEQ ID NO: 52983 - protein, 10 aa, Artificial Sequence
  Description of Artificial Sequence: Synthetic epitope
VDYSVLQQRF

SEQ ID NO: 52984 - protein, 10 aa, Artificial Sequence
  Description of Artificial Sequence: Synthetic epitope
VEAAERQPLQ

SEQ ID NO: 52985 - protein, 10 aa, Artificial Sequence
  Description of Artificial Sequence: Synthetic epitope
VEAAEVVFPN

SEQ ID NO: 52986 - protein, 10 aa, Artificial Sequence
  Description of Artificial Sequence: Synthetic epitope
VEAEKQAALN

SEQ ID NO: 52987 - protein, 10 aa, Artificial Sequence
  Description of Artificial Sequence: Synthetic epitope
VEAIEEQTSQ

SEQ ID NO: 52988 - protein, 10 aa, Artificial Sequence
  Description of Artificial Sequence: Synthetic epitope
VEAKMAEELK

SEQ ID NO: 52989 - protein, 10 aa, Artificial Sequence
  Description of Artificial Sequence: Synthetic epitope
VEAKVTSGRE

SEQ ID NO: 52990 - protein, 10 aa, Artificial Sequence
  Description of Artificial Sequence: Synthetic epitope
VEALTALNHY

SEQ ID NO: 52991 - protein, 10 aa, Artificial Sequence
  Description of Artificial Sequence: Synthetic epitope
VEANVETETY

SEQ ID NO: 52992 - protein, 10 aa, Artificial Sequence
  Description of Artificial Sequence: Synthetic epitope
VEAQFDSRVR

SEQ ID NO: 52993 - protein, 10 aa, Artificial Sequence
  Description of Artificial Sequence: Synthetic epitope
VEARENSLYL

SEQ ID NO: 52994 - protein, 10 aa, Artificial Sequence
  Description of Artificial Sequence: Synthetic epitope
VEAVMAELSL

SEQ ID NO: 52995 - protein, 10 aa, Artificial Sequence
  Description of Artificial Sequence: Synthetic epitope
VEDAETYKKM

SEQ ID NO: 52996 - protein, 10 aa, Artificial Sequence
  Description of Artificial Sequence: Synthetic epitope
VEDDRTLQSL

SEQ ID NO: 52997 - protein, 10 aa, Artificial Sequence
  Description of Artificial Sequence: Synthetic epitope
VEDHSTSSGT

SEQ ID NO: 52998 - protein, 10 aa, Artificial Sequence
  Description of Artificial Sequence: Synthetic epitope
VEDQNKKNEL

SEQ ID NO: 52999 - protein, 10 aa, Artificial Sequence
  Description of Artificial Sequence: Synthetic epitope
VEDTEAEKGR

SEQ ID NO: 53000 - protein, 10 aa, Artificial Sequence
  Description of Artificial Sequence: Synthetic epitope
VEEAAEAQAE

SEQ ID NO: 53001 - protein, 10 aa, Artificial Sequence
  Description of Artificial Sequence: Synthetic epitope
VEEAEAEAVA

SEQ ID NO: 53002 - protein, 10 aa, Artificial Sequence
  Description of Artificial Sequence: Synthetic epitope
VEEAKSSLAM

SEQ ID NO: 53003 - protein, 10 aa, Artificial Sequence
  Description of Artificial Sequence: Synthetic epitope
VEEATAKAEP

SEQ ID NO: 53004 - protein, 10 aa, Artificial Sequence
  Description of Artificial Sequence: Synthetic epitope
VEEIVAKNAR

SEQ ID NO: 53005 - protein, 10 aa, Artificial Sequence
  Description of Artificial Sequence: Synthetic epitope
VEEKKLLEQE

SEQ ID NO: 53006 - protein, 10 aa, Artificial Sequence
  Description of Artificial Sequence: Synthetic epitope
VEEKKTRAAR

SEQ ID NO: 53007 - protein, 10 aa, Artificial Sequence
  Description of Artificial Sequence: Synthetic epitope
VEELAAKEVD

SEQ ID NO: 53008 - protein, 10 aa, Artificial Sequence
  Description of Artificial Sequence: Synthetic epitope
VEELLSTVNS

SEQ ID NO: 53009 - protein, 10 aa, Artificial Sequence
  Description of Artificial Sequence: Synthetic epitope
VEEMIATRKV

SEQ ID NO: 53010 - protein, 10 aa, Artificial Sequence
  Description of Artificial Sequence: Synthetic epitope
VEEMQSGGIF

SEQ ID NO: 53011 - protein, 10 aa, Artificial Sequence
  Description of Artificial Sequence: Synthetic epitope
VEEQNAEKAR

SEQ ID NO: 53012 - protein, 10 aa, Artificial Sequence
  Description of Artificial Sequence: Synthetic epitope
VEESAMMGVS

SEQ ID NO: 53013 - protein, 10 aa, Artificial Sequence
  Description of Artificial Sequence: Synthetic epitope
VEESETFIKG

SEQ ID NO: 53014 - protein, 10 aa, Artificial Sequence
  Description of Artificial Sequence: Synthetic epitope
VEESLPLSEL

SEQ ID NO: 53015 - protein, 10 aa, Artificial Sequence
  Description of Artificial Sequence: Synthetic epitope
VEETESKTEQ

SEQ ID NO: 53016 - protein, 10 aa, Artificial Sequence
  Description of Artificial Sequence: Synthetic epitope
VEETVEVIRN

SEQ ID NO: 53017 - protein, 10 aa, Artificial Sequence
  Description of Artificial Sequence: Synthetic epitope
VEFKLKTTEN

SEQ ID NO: 53018 - protein, 10 aa, Artificial Sequence
  Description of Artificial Sequence: Synthetic epitope
VEFKTMNAKL

SEQ ID NO: 53019 - protein, 10 aa, Artificial Sequence
  Description of Artificial Sequence: Synthetic epitope
VEFLAMLKNT

SEQ ID NO: 53020 - protein, 10 aa, Artificial Sequence
  Description of Artificial Sequence: Synthetic epitope
VEFLKLAQLN

SEQ ID NO: 53021 - protein, 10 aa, Artificial Sequence
  Description of Artificial Sequence: Synthetic epitope
VEFMNMKKSH

SEQ ID NO: 53022 - protein, 10 aa, Artificial Sequence
  Description of Artificial Sequence: Synthetic epitope
VEFRVIRSLT

SEQ ID NO: 53023 - protein, 10 aa, Artificial Sequence
  Description of Artificial Sequence: Synthetic epitope
VEGAFATEEH

SEQ ID NO: 53024 - protein, 10 aa, Artificial Sequence
  Description of Artificial Sequence: Synthetic epitope
VEGALALALP

SEQ ID NO: 53025 - protein, 10 aa, Artificial Sequence
  Description of Artificial Sequence: Synthetic epitope
VEGIHKVPKA

SEQ ID NO: 53026 - protein, 10 aa, Artificial Sequence
  Description of Artificial Sequence: Synthetic epitope
VEGLKLYSEM

SEQ ID NO: 53027 - protein, 10 aa, Artificial Sequence
  Description of Artificial Sequence: Synthetic epitope
VEGMVTEKPA

SEQ ID NO: 53028 - protein, 10 aa, Artificial Sequence
  Description of Artificial Sequence: Synthetic epitope
VEGQSNLESE

SEQ ID NO: 53029 - protein, 10 aa, Artificial Sequence
  Description of Artificial Sequence: Synthetic epitope
VEGRSNSAEP

SEQ ID NO: 53030 - protein, 10 aa, Artificial Sequence
  Description of Artificial Sequence: Synthetic epitope
VEGTAAQSSG

SEQ ID NO: 53031 - protein, 10 aa, Artificial Sequence
  Description of Artificial Sequence: Synthetic epitope
VEHRKKAQAE

SEQ ID NO: 53032 - protein, 10 aa, Artificial Sequence
  Description of Artificial Sequence: Synthetic epitope
VEHSSALAVE

SEQ ID NO: 53033 - protein, 10 aa, Artificial Sequence
  Description of Artificial Sequence: Synthetic epitope
VEIAKQSVTI

SEQ ID NO: 53034 - protein, 10 aa, Artificial Sequence
  Description of Artificial Sequence: Synthetic epitope
VEIEKQIAAK

SEQ ID NO: 53035 - protein, 10 aa, Artificial Sequence
  Description of Artificial Sequence: Synthetic epitope
VEIFEVKEDQ

SEQ ID NO: 53036 - protein, 10 aa, Artificial Sequence
  Description of Artificial Sequence: Synthetic epitope
VEIRSIVSES

SEQ ID NO: 53037 - protein, 10 aa, Artificial Sequence
  Description of Artificial Sequence: Synthetic epitope
VEITMKPSKA

SEQ ID NO: 53038 - protein, 10 aa, Artificial Sequence
  Description of Artificial Sequence: Synthetic epitope
VEIVASSDSS

SEQ ID NO: 53039 - protein, 10 aa, Artificial Sequence
  Description of Artificial Sequence: Synthetic epitope
VEIYASVAQL

SEQ ID NO: 53040 - protein, 10 aa, Artificial Sequence
  Description of Artificial Sequence: Synthetic epitope
VEKAAGAGLE

SEQ ID NO: 53041 - protein, 10 aa, Artificial Sequence
  Description of Artificial Sequence: Synthetic epitope
VEKAGLKKSM

SEQ ID NO: 53042 - protein, 10 aa, Artificial Sequence
  Description of Artificial Sequence: Synthetic epitope
VEKDSLRAVE

SEQ ID NO: 53043 - protein, 10 aa, Artificial Sequence
  Description of Artificial Sequence: Synthetic epitope
VEKFKYKTPQ

SEQ ID NO: 53044 - protein, 10 aa, Artificial Sequence
  Description of Artificial Sequence: Synthetic epitope
VEKKIRSALP

SEQ ID NO: 53045 - protein, 10 aa, Artificial Sequence
  Description of Artificial Sequence: Synthetic epitope
VEKKSEMESV

SEQ ID NO: 53046 - protein, 10 aa, Artificial Sequence
  Description of Artificial Sequence: Synthetic epitope
VEKLAKGYQS

SEQ ID NO: 53047 - protein, 10 aa, Artificial Sequence
  Description of Artificial Sequence: Synthetic epitope
VEKLAKGYQS

SEQ ID NO: 53048 - protein, 10 aa, Artificial Sequence
  Description of Artificial Sequence: Synthetic epitope
VEKNKRMNKK

SEQ ID NO: 53049 - protein, 10 aa, Artificial Sequence
  Description of Artificial Sequence: Synthetic epitope
VEKRAFREIQ

SEQ ID NO: 53050 - protein, 10 aa, Artificial Sequence
  Description of Artificial Sequence: Synthetic epitope
VEKRQAKFME

SEQ ID NO: 53051 - protein, 10 aa, Artificial Sequence
  Description of Artificial Sequence: Synthetic epitope
VEKRSASSES

SEQ ID NO: 53052 - protein, 10 aa, Artificial Sequence
  Description of Artificial Sequence: Synthetic epitope
VEKVPSNSQL

SEQ ID NO: 53053 - protein, 10 aa, Artificial Sequence
  Description of Artificial Sequence: Synthetic epitope
VELATSLSDM

SEQ ID NO: 53054 - protein, 10 aa, Artificial Sequence
  Description of Artificial Sequence: Synthetic epitope
VELERVMINS

SEQ ID NO: 53055 - protein, 10 aa, Artificial Sequence
  Description of Artificial Sequence: Synthetic epitope
VELGTVAELR

SEQ ID NO: 53056 - protein, 10 aa, Artificial Sequence
  Description of Artificial Sequence: Synthetic epitope
VELKKAALSA

SEQ ID NO: 53057 - protein, 10 aa, Artificial Sequence
  Description of Artificial Sequence: Synthetic epitope
VELLVELQEL

SEQ ID NO: 53058 - protein, 10 aa, Artificial Sequence
  Description of Artificial Sequence: Synthetic epitope
VELQEQAEAQ

SEQ ID NO: 53059 - protein, 10 aa, Artificial Sequence
  Description of Artificial Sequence: Synthetic epitope
VELQFSDANA

SEQ ID NO: 53060 - protein, 10 aa, Artificial Sequence
  Description of Artificial Sequence: Synthetic epitope
VELQQFFSNM

SEQ ID NO: 53061 - protein, 10 aa, Artificial Sequence
  Description of Artificial Sequence: Synthetic epitope
VELQQLEAGL

SEQ ID NO: 53062 - protein, 10 aa, Artificial Sequence
  Description of Artificial Sequence: Synthetic epitope
VELSQATTAL

SEQ ID NO: 53063 - protein, 10 aa, Artificial Sequence
  Description of Artificial Sequence: Synthetic epitope
VELTDKLNSR

SEQ ID NO: 53064 - protein, 10 aa, Artificial Sequence
  Description of Artificial Sequence: Synthetic epitope
VEMEREHEKS

SEQ ID NO: 53065 - protein, 10 aa, Artificial Sequence
  Description of Artificial Sequence: Synthetic epitope
VEMLSSMDSA

SEQ ID NO: 53066 - protein, 10 aa, Artificial Sequence
  Description of Artificial Sequence: Synthetic epitope
VEMSLKLQSV

SEQ ID NO: 53067 - protein, 10 aa, Artificial Sequence
  Description of Artificial Sequence: Synthetic epitope
VEMTRTRIEG

SEQ ID NO: 53068 - protein, 10 aa, Artificial Sequence
  Description of Artificial Sequence: Synthetic epitope
VEMVKGSVEN

SEQ ID NO: 53069 - protein, 10 aa, Artificial Sequence
  Description of Artificial Sequence: Synthetic epitope
VEMVSLAAEE

SEQ ID NO: 53070 - protein, 10 aa, Artificial Sequence
  Description of Artificial Sequence: Synthetic epitope
VENAESVNID

SEQ ID NO: 53071 - protein, 10 aa, Artificial Sequence
  Description of Artificial Sequence: Synthetic epitope
VENDSMSQSS

SEQ ID NO: 53072 - protein, 10 aa, Artificial Sequence
  Description of Artificial Sequence: Synthetic epitope
VENGGVLGSR

SEQ ID NO: 53073 - protein, 10 aa, Artificial Sequence
  Description of Artificial Sequence: Synthetic epitope
VENRITKESE

SEQ ID NO: 53074 - protein, 10 aa, Artificial Sequence
  Description of Artificial Sequence: Synthetic epitope
VENSVAEFDS

SEQ ID NO: 53075 - protein, 10 aa, Artificial Sequence
  Description of Artificial Sequence: Synthetic epitope
VEPAHSVASQ

SEQ ID NO: 53076 - protein, 10 aa, Artificial Sequence
  Description of Artificial Sequence: Synthetic epitope
VEPALKAALK

SEQ ID NO: 53077 - protein, 10 aa, Artificial Sequence
  Description of Artificial Sequence: Synthetic epitope
VEPESMMIID

SEQ ID NO: 53078 - protein, 10 aa, Artificial Sequence
  Description of Artificial Sequence: Synthetic epitope
VEPKLQSVKH

SEQ ID NO: 53079 - protein, 10 aa, Artificial Sequence
  Description of Artificial Sequence: Synthetic epitope
VEPPQTLHQQ

SEQ ID NO: 53080 - protein, 10 aa, Artificial Sequence
  Description of Artificial Sequence: Synthetic epitope
VEQAAREKTE

SEQ ID NO: 53081 - protein, 10 aa, Artificial Sequence
  Description of Artificial Sequence: Synthetic epitope
VEQEIQTSVA

SEQ ID NO: 53082 - protein, 10 aa, Artificial Sequence
  Description of Artificial Sequence: Synthetic epitope
VEQKQRLQKY

SEQ ID NO: 53083 - protein, 10 aa, Artificial Sequence
  Description of Artificial Sequence: Synthetic epitope
VEQLNIIEDE

SEQ ID NO: 53084 - protein, 10 aa, Artificial Sequence
  Description of Artificial Sequence: Synthetic epitope
VEQMRDMGSR

SEQ ID NO: 53085 - protein, 10 aa, Artificial Sequence
  Description of Artificial Sequence: Synthetic epitope
VEQNMKIERL

SEQ ID NO: 53086 - protein, 10 aa, Artificial Sequence
  Description of Artificial Sequence: Synthetic epitope
VEQQLSTSLD

SEQ ID NO: 53087 - protein, 10 aa, Artificial Sequence
  Description of Artificial Sequence: Synthetic epitope
VEQQMYFWQY

SEQ ID NO: 53088 - protein, 10 aa, Artificial Sequence
  Description of Artificial Sequence: Synthetic epitope
VEQSADISQN

SEQ ID NO: 53089 - protein, 10 aa, Artificial Sequence
  Description of Artificial Sequence: Synthetic epitope
VEREANELRR

SEQ ID NO: 53090 - protein, 10 aa, Artificial Sequence
  Description of Artificial Sequence: Synthetic epitope
VERERRKEQE

SEQ ID NO: 53091 - protein, 10 aa, Artificial Sequence
  Description of Artificial Sequence: Synthetic epitope
VERGEAVAAS

SEQ ID NO: 53092 - protein, 10 aa, Artificial Sequence
  Description of Artificial Sequence: Synthetic epitope
VERLKFKSSD

SEQ ID NO: 53093 - protein, 10 aa, Artificial Sequence
  Description of Artificial Sequence: Synthetic epitope
VERMAKLSGD

SEQ ID NO: 53094 - protein, 10 aa, Artificial Sequence
  Description of Artificial Sequence: Synthetic epitope
VERRENTAEA

SEQ ID NO: 53095 - protein, 10 aa, Artificial Sequence
  Description of Artificial Sequence: Synthetic epitope
VERRNRVLAG

SEQ ID NO: 53096 - protein, 10 aa, Artificial Sequence
  Description of Artificial Sequence: Synthetic epitope
VERSYVSKPT

SEQ ID NO: 53097 - protein, 10 aa, Artificial Sequence
  Description of Artificial Sequence: Synthetic epitope
VERTITMKQL

SEQ ID NO: 53098 - protein, 10 aa, Artificial Sequence
  Description of Artificial Sequence: Synthetic epitope
VESAEGKSEE

SEQ ID NO: 53099 - protein, 10 aa, Artificial Sequence
  Description of Artificial Sequence: Synthetic epitope
VESAKNKKHL

SEQ ID NO: 53100 - protein, 10 aa, Artificial Sequence
  Description of Artificial Sequence: Synthetic epitope
VESASNMEQL

SEQ ID NO: 53101 - protein, 10 aa, Artificial Sequence
  Description of Artificial Sequence: Synthetic epitope
VESETHVTDM

SEQ ID NO: 53102 - protein, 10 aa, Artificial Sequence
  Description of Artificial Sequence: Synthetic epitope
VESETVEQDD

SEQ ID NO: 53103 - protein, 10 aa, Artificial Sequence
  Description of Artificial Sequence: Synthetic epitope
VESGVSATAE

SEQ ID NO: 53104 - protein, 10 aa, Artificial Sequence
  Description of Artificial Sequence: Synthetic epitope
VESHNSITVS

SEQ ID NO: 53105 - protein, 10 aa, Artificial Sequence
  Description of Artificial Sequence: Synthetic epitope
VESIENSRQL

SEQ ID NO: 53106 - protein, 10 aa, Artificial Sequence
  Description of Artificial Sequence: Synthetic epitope
VESKEISVEK

SEQ ID NO: 53107 - protein, 10 aa, Artificial Sequence
  Description of Artificial Sequence: Synthetic epitope
VESLKLVTPY

SEQ ID NO: 53108 - protein, 10 aa, Artificial Sequence
  Description of Artificial Sequence: Synthetic epitope
VESRSVSTSP

SEQ ID NO: 53109 - protein, 10 aa, Artificial Sequence
  Description of Artificial Sequence: Synthetic epitope
VESSKVSKQQ

SEQ ID NO: 53110 - protein, 10 aa, Artificial Sequence
  Description of Artificial Sequence: Synthetic epitope
VESSNKGKVQ

SEQ ID NO: 53111 - protein, 10 aa, Artificial Sequence
  Description of Artificial Sequence: Synthetic epitope
VESTSSANED

SEQ ID NO: 53112 - protein, 10 aa, Artificial Sequence
  Description of Artificial Sequence: Synthetic epitope
VESVQEAKAQ

SEQ ID NO: 53113 - protein, 10 aa, Artificial Sequence
  Description of Artificial Sequence: Synthetic epitope
VETKRIQPQP

SEQ ID NO: 53114 - protein, 10 aa, Artificial Sequence
  Description of Artificial Sequence: Synthetic epitope
VETLNQLNSK

SEQ ID NO: 53115 - protein, 10 aa, Artificial Sequence
  Description of Artificial Sequence: Synthetic epitope
VETNLERNVE

SEQ ID NO: 53116 - protein, 10 aa, Artificial Sequence
  Description of Artificial Sequence: Synthetic epitope
VETQKQRFQQ

SEQ ID NO: 53117 - protein, 10 aa, Artificial Sequence
  Description of Artificial Sequence: Synthetic epitope
VETRTLIKSE

SEQ ID NO: 53118 - protein, 10 aa, Artificial Sequence
  Description of Artificial Sequence: Synthetic epitope
VETSKKWAAG

SEQ ID NO: 53119 - protein, 10 aa, Artificial Sequence
  Description of Artificial Sequence: Synthetic epitope
VETSSILSGE

SEQ ID NO: 53120 - protein, 10 aa, Artificial Sequence
  Description of Artificial Sequence: Synthetic epitope
VETSVDLSEI

SEQ ID NO: 53121 - protein, 10 aa, Artificial Sequence
  Description of Artificial Sequence: Synthetic epitope
VETVQEVTLE

SEQ ID NO: 53122 - protein, 10 aa, Artificial Sequence
  Description of Artificial Sequence: Synthetic epitope
VEVDSFDGHH

SEQ ID NO: 53123 - protein, 10 aa, Artificial Sequence
  Description of Artificial Sequence: Synthetic epitope
VEVELLSYET

SEQ ID NO: 53124 - protein, 10 aa, Artificial Sequence
  Description of Artificial Sequence: Synthetic epitope
VEVGQRVQTS

SEQ ID NO: 53125 - protein, 10 aa, Artificial Sequence
  Description of Artificial Sequence: Synthetic epitope
VEVHQIVYPL

SEQ ID NO: 53126 - protein, 10 aa, Artificial Sequence
  Description of Artificial Sequence: Synthetic epitope
VEVKAEKRIP

SEQ ID NO: 53127 - protein, 10 aa, Artificial Sequence
  Description of Artificial Sequence: Synthetic epitope
VEVQEVSLLD

SEQ ID NO: 53128 - protein, 10 aa, Artificial Sequence
  Description of Artificial Sequence: Synthetic epitope
VEVQRKDTSA

SEQ ID NO: 53129 - protein, 10 aa, Artificial Sequence
  Description of Artificial Sequence: Synthetic epitope
VEVQSLSLEE

SEQ ID NO: 53130 - protein, 10 aa, Artificial Sequence
  Description of Artificial Sequence: Synthetic epitope
VEVSSGNSEV

SEQ ID NO: 53131 - protein, 10 aa, Artificial Sequence
  Description of Artificial Sequence: Synthetic epitope
VEVVLQAEST

SEQ ID NO: 53132 - protein, 10 aa, Artificial Sequence
  Description of Artificial Sequence: Synthetic epitope
VEYHEGLKSN

SEQ ID NO: 53133 - protein, 10 aa, Artificial Sequence
  Description of Artificial Sequence: Synthetic epitope
VEYNSWHVLS

SEQ ID NO: 53134 - protein, 10 aa, Artificial Sequence
  Description of Artificial Sequence: Synthetic epitope
VEYRAEVGQN

SEQ ID NO: 53135 - protein, 10 aa, Artificial Sequence
  Description of Artificial Sequence: Synthetic epitope
VEYSIADSFE

SEQ ID NO: 53136 - protein, 10 aa, Artificial Sequence
  Description of Artificial Sequence: Synthetic epitope
VFAKKIGELE

SEQ ID NO: 53137 - protein, 10 aa, Artificial Sequence
  Description of Artificial Sequence: Synthetic epitope
VFDIQLVADS

SEQ ID NO: 53138 - protein, 10 aa, Artificial Sequence
  Description of Artificial Sequence: Synthetic epitope
VFDQLSYEVT

SEQ ID NO: 53139 - protein, 10 aa, Artificial Sequence
  Description of Artificial Sequence: Synthetic epitope
VFFKQMKEES

SEQ ID NO: 53140 - protein, 10 aa, Artificial Sequence
  Description of Artificial Sequence: Synthetic epitope
VFGHAIKAAY

SEQ ID NO: 53141 - protein, 10 aa, Artificial Sequence
  Description of Artificial Sequence: Synthetic epitope
VFKDSSQKDL

SEQ ID NO: 53142 - protein, 10 aa, Artificial Sequence
  Description of Artificial Sequence: Synthetic epitope
VFKSGSVDSR

SEQ ID NO: 53143 - protein, 10 aa, Artificial Sequence
  Description of Artificial Sequence: Synthetic epitope
VFLAKLIAQA

SEQ ID NO: 53144 - protein, 10 aa, Artificial Sequence
  Description of Artificial Sequence: Synthetic epitope
VFLENVIWYA

SEQ ID NO: 53145 - protein, 10 aa, Artificial Sequence
  Description of Artificial Sequence: Synthetic epitope
VFNNSASQSS

SEQ ID NO: 53146 - protein, 10 aa, Artificial Sequence
  Description of Artificial Sequence: Synthetic epitope
VFNSMLVGKV

SEQ ID NO: 53147 - protein, 10 aa, Artificial Sequence
  Description of Artificial Sequence: Synthetic epitope
VFQVAEKMEK

SEQ ID NO: 53148 - protein, 10 aa, Artificial Sequence
  Description of Artificial Sequence: Synthetic epitope
VFRVDLGHMR

SEQ ID NO: 53149 - protein, 10 aa, Artificial Sequence
  Description of Artificial Sequence: Synthetic epitope
VFSFRKSTPE

SEQ ID NO: 53150 - protein, 10 aa, Artificial Sequence
  Description of Artificial Sequence: Synthetic epitope
VFSNRLGWHN

SEQ ID NO: 53151 - protein, 10 aa, Artificial Sequence
  Description of Artificial Sequence: Synthetic epitope
VFTAAIISRV

SEQ ID NO: 53152 - protein, 10 aa, Artificial Sequence
  Description of Artificial Sequence: Synthetic epitope
VFTQAVFETI

SEQ ID NO: 53153 - protein, 10 aa, Artificial Sequence
  Description of Artificial Sequence: Synthetic epitope
VFVKFSVGLD

SEQ ID NO: 53154 - protein, 10 aa, Artificial Sequence
  Description of Artificial Sequence: Synthetic epitope
VFVSSVVSKS

SEQ ID NO: 53155 - protein, 10 aa, Artificial Sequence
  Description of Artificial Sequence: Synthetic epitope
VGADASSDVP

SEQ ID NO: 53156 - protein, 10 aa, Artificial Sequence
  Description of Artificial Sequence: Synthetic epitope
VGAEIGNTIE

SEQ ID NO: 53157 - protein, 10 aa, Artificial Sequence
  Description of Artificial Sequence: Synthetic epitope
VGAMSKVELA

SEQ ID NO: 53158 - protein, 10 aa, Artificial Sequence
  Description of Artificial Sequence: Synthetic epitope
VGAQSREPNG

SEQ ID NO: 53159 - protein, 10 aa, Artificial Sequence
  Description of Artificial Sequence: Synthetic epitope
VGASELANTA

SEQ ID NO: 53160 - protein, 10 aa, Artificial Sequence
  Description of Artificial Sequence: Synthetic epitope
VGDSLKAEKE

SEQ ID NO: 53161 - protein, 10 aa, Artificial Sequence
  Description of Artificial Sequence: Synthetic epitope
VGDSSASKEQ

SEQ ID NO: 53162 - protein, 10 aa, Artificial Sequence
  Description of Artificial Sequence: Synthetic epitope
VGEAVALSTS

SEQ ID NO: 53163 - protein, 10 aa, Artificial Sequence
  Description of Artificial Sequence: Synthetic epitope
VGEFAQIREE

SEQ ID NO: 53164 - protein, 10 aa, Artificial Sequence
  Description of Artificial Sequence: Synthetic epitope
VGEPLTLRTA

SEQ ID NO: 53165 - protein, 10 aa, Artificial Sequence
  Description of Artificial Sequence: Synthetic epitope
VGEQERTVDT

SEQ ID NO: 53166 - protein, 10 aa, Artificial Sequence
  Description of Artificial Sequence: Synthetic epitope
VGETNEETSM

SEQ ID NO: 53167 - protein, 10 aa, Artificial Sequence
  Description of Artificial Sequence: Synthetic epitope
VGGATKQAKA

SEQ ID NO: 53168 - protein, 10 aa, Artificial Sequence
  Description of Artificial Sequence: Synthetic epitope
VGGEHSTFSM

SEQ ID NO: 53169 - protein, 10 aa, Artificial Sequence
  Description of Artificial Sequence: Synthetic epitope
VGGLRLEAAG

SEQ ID NO: 53170 - protein, 10 aa, Artificial Sequence
  Description of Artificial Sequence: Synthetic epitope
VGGLSVSSRD

SEQ ID NO: 53171 - protein, 10 aa, Artificial Sequence
  Description of Artificial Sequence: Synthetic epitope
VGGQPRMKLT

SEQ ID NO: 53172 - protein, 10 aa, Artificial Sequence
  Description of Artificial Sequence: Synthetic epitope
VGGQSVKKVD

SEQ ID NO: 53173 - protein, 10 aa, Artificial Sequence
  Description of Artificial Sequence: Synthetic epitope
VGGTAATAAG

SEQ ID NO: 53174 - protein, 10 aa, Artificial Sequence
  Description of Artificial Sequence: Synthetic epitope
VGIIESIHLK

SEQ ID NO: 53175 - protein, 10 aa, Artificial Sequence
  Description of Artificial Sequence: Synthetic epitope
VGIKLLRMVK

SEQ ID NO: 53176 - protein, 10 aa, Artificial Sequence
  Description of Artificial Sequence: Synthetic epitope
VGILQIEQES

SEQ ID NO: 53177 - protein, 10 aa, Artificial Sequence
  Description of Artificial Sequence: Synthetic epitope
VGKIVAALNA

SEQ ID NO: 53178 - protein, 10 aa, Artificial Sequence
  Description of Artificial Sequence: Synthetic epitope
VGKKDEEQAA

SEQ ID NO: 53179 - protein, 10 aa, Artificial Sequence
  Description of Artificial Sequence: Synthetic epitope
VGKLSDESLD

SEQ ID NO: 53180 - protein, 10 aa, Artificial Sequence
  Description of Artificial Sequence: Synthetic epitope
VGKNLNSVSV

SEQ ID NO: 53181 - protein, 10 aa, Artificial Sequence
  Description of Artificial Sequence: Synthetic epitope
VGLVDAVKAT

SEQ ID NO: 53182 - protein, 10 aa, Artificial Sequence
  Description of Artificial Sequence: Synthetic epitope
VGMDIIKINV

SEQ ID NO: 53183 - protein, 10 aa, Artificial Sequence
  Description of Artificial Sequence: Synthetic epitope
VGMSQMDSHK

SEQ ID NO: 53184 - protein, 10 aa, Artificial Sequence
  Description of Artificial Sequence: Synthetic epitope
VGNATEAAVS

SEQ ID NO: 53185 - protein, 10 aa, Artificial Sequence
  Description of Artificial Sequence: Synthetic epitope
VGNKWEAYLG

SEQ ID NO: 53186 - protein, 10 aa, Artificial Sequence
  Description of Artificial Sequence: Synthetic epitope
VGNRTSEGFQ

SEQ ID NO: 53187 - protein, 10 aa, Artificial Sequence
  Description of Artificial Sequence: Synthetic epitope
VGQASKGTSK

SEQ ID NO: 53188 - protein, 10 aa, Artificial Sequence
  Description of Artificial Sequence: Synthetic epitope
VGQKNLASKT

SEQ ID NO: 53189 - protein, 10 aa, Artificial Sequence
  Description of Artificial Sequence: Synthetic epitope
VGQTRTNTFE

SEQ ID NO: 53190 - protein, 10 aa, Artificial Sequence
  Description of Artificial Sequence: Synthetic epitope
VGRENELSAG

SEQ ID NO: 53191 - protein, 10 aa, Artificial Sequence
  Description of Artificial Sequence: Synthetic epitope
VGRQKEVNEN

SEQ ID NO: 53192 - protein, 10 aa, Artificial Sequence
  Description of Artificial Sequence: Synthetic epitope
VGRTQQEQPR

SEQ ID NO: 53193 - protein, 10 aa, Artificial Sequence
  Description of Artificial Sequence: Synthetic epitope
VGSEGAYKAA

SEQ ID NO: 53194 - protein, 10 aa, Artificial Sequence
  Description of Artificial Sequence: Synthetic epitope
VGSEQEEYAK

SEQ ID NO: 53195 - protein, 10 aa, Artificial Sequence
  Description of Artificial Sequence: Synthetic epitope
VGSKAVKEER

SEQ ID NO: 53196 - protein, 10 aa, Artificial Sequence
  Description of Artificial Sequence: Synthetic epitope
VGSPTRQTYQ

SEQ ID NO: 53197 - protein, 10 aa, Artificial Sequence
  Description of Artificial Sequence: Synthetic epitope
VGSQSVRELL

SEQ ID NO: 53198 - protein, 10 aa, Artificial Sequence
  Description of Artificial Sequence: Synthetic epitope
VGSRATTVSE

SEQ ID NO: 53199 - protein, 10 aa, Artificial Sequence
  Description of Artificial Sequence: Synthetic epitope
VGSSQKTKLQ

SEQ ID NO: 53200 - protein, 10 aa, Artificial Sequence
  Description of Artificial Sequence: Synthetic epitope
VGSVKALQKQ

SEQ ID NO: 53201 - protein, 10 aa, Artificial Sequence
  Description of Artificial Sequence: Synthetic epitope
VGSVTQLNQQ

SEQ ID NO: 53202 - protein, 10 aa, Artificial Sequence
  Description of Artificial Sequence: Synthetic epitope
VGTLSRTELQ

SEQ ID NO: 53203 - protein, 10 aa, Artificial Sequence
  Description of Artificial Sequence: Synthetic epitope
VGTRKSHIST

SEQ ID NO: 53204 - protein, 10 aa, Artificial Sequence
  Description of Artificial Sequence: Synthetic epitope
VGTSDAETSA

SEQ ID NO: 53205 - protein, 10 aa, Artificial Sequence
  Description of Artificial Sequence: Synthetic epitope
VGVPDRTVSR

SEQ ID NO: 53206 - protein, 10 aa, Artificial Sequence
  Description of Artificial Sequence: Synthetic epitope
VGVRKSALEP

SEQ ID NO: 53207 - protein, 10 aa, Artificial Sequence
  Description of Artificial Sequence: Synthetic epitope
VGWVNMSQST

SEQ ID NO: 53208 - protein, 10 aa, Artificial Sequence
  Description of Artificial Sequence: Synthetic epitope
VHDADLQIGK

SEQ ID NO: 53209 - protein, 10 aa, Artificial Sequence
  Description of Artificial Sequence: Synthetic epitope
VHDKSAHQTH

SEQ ID NO: 53210 - protein, 10 aa, Artificial Sequence
  Description of Artificial Sequence: Synthetic epitope
VHEETVKNDE

SEQ ID NO: 53211 - protein, 10 aa, Artificial Sequence
  Description of Artificial Sequence: Synthetic epitope
VHEMKSLKQE

SEQ ID NO: 53212 - protein, 10 aa, Artificial Sequence
  Description of Artificial Sequence: Synthetic epitope
VHHKNMIIDP

SEQ ID NO: 53213 - protein, 10 aa, Artificial Sequence
  Description of Artificial Sequence: Synthetic epitope
VHKAESSTDS

SEQ ID NO: 53214 - protein, 10 aa, Artificial Sequence
  Description of Artificial Sequence: Synthetic epitope
VHKALSSMSS

SEQ ID NO: 53215 - protein, 10 aa, Artificial Sequence
  Description of Artificial Sequence: Synthetic epitope
VHKESRVQGL

SEQ ID NO: 53216 - protein, 10 aa, Artificial Sequence
  Description of Artificial Sequence: Synthetic epitope
VHKLSTKDVE

SEQ ID NO: 53217 - protein, 10 aa, Artificial Sequence
  Description of Artificial Sequence: Synthetic epitope
VHKLSYYEYD

SEQ ID NO: 53218 - protein, 10 aa, Artificial Sequence
  Description of Artificial Sequence: Synthetic epitope
VHKSKVTVSS

SEQ ID NO: 53219 - protein, 10 aa, Artificial Sequence
  Description of Artificial Sequence: Synthetic epitope
VHKVTKIGFP

SEQ ID NO: 53220 - protein, 10 aa, Artificial Sequence
  Description of Artificial Sequence: Synthetic epitope
VHNVMSIPHH

SEQ ID NO: 53221 - protein, 10 aa, Artificial Sequence
  Description of Artificial Sequence: Synthetic epitope
VHPLREAIDM

SEQ ID NO: 53222 - protein, 10 aa, Artificial Sequence
  Description of Artificial Sequence: Synthetic epitope
VHQQYVQRIE

SEQ ID NO: 53223 - protein, 10 aa, Artificial Sequence
  Description of Artificial Sequence: Synthetic epitope
VHQSSHWRKA

SEQ ID NO: 53224 - protein, 10 aa, Artificial Sequence
  Description of Artificial Sequence: Synthetic epitope
VHSEVLMPNR

SEQ ID NO: 53225 - protein, 10 aa, Artificial Sequence
  Description of Artificial Sequence: Synthetic epitope
VHSKVSTKKS

SEQ ID NO: 53226 - protein, 10 aa, Artificial Sequence
  Description of Artificial Sequence: Synthetic epitope
VHTPVATVKQ

SEQ ID NO: 53227 - protein, 10 aa, Artificial Sequence
  Description of Artificial Sequence: Synthetic epitope
VHVRRLVAKG

SEQ ID NO: 53228 - protein, 10 aa, Artificial Sequence
  Description of Artificial Sequence: Synthetic epitope
VHVTVDLKYY

SEQ ID NO: 53229 - protein, 10 aa, Artificial Sequence
  Description of Artificial Sequence: Synthetic epitope
VIADEAVKLQ

SEQ ID NO: 53230 - protein, 10 aa, Artificial Sequence
  Description of Artificial Sequence: Synthetic epitope
VIAESVVKKT

SEQ ID NO: 53231 - protein, 10 aa, Artificial Sequence
  Description of Artificial Sequence: Synthetic epitope
VIATKSSEQS

SEQ ID NO: 53232 - protein, 10 aa, Artificial Sequence
  Description of Artificial Sequence: Synthetic epitope
VIAVKTSKST

SEQ ID NO: 53233 - protein, 10 aa, Artificial Sequence
  Description of Artificial Sequence: Synthetic epitope
VIDAKNKSGS

SEQ ID NO: 53234 - protein, 10 aa, Artificial Sequence
  Description of Artificial Sequence: Synthetic epitope
VIDSSKHSDD

SEQ ID NO: 53235 - protein, 10 aa, Artificial Sequence
  Description of Artificial Sequence: Synthetic epitope
VIEGSVTESD

SEQ ID NO: 53236 - protein, 10 aa, Artificial Sequence
  Description of Artificial Sequence: Synthetic epitope
VIEKAELEEM

SEQ ID NO: 53237 - protein, 10 aa, Artificial Sequence
  Description of Artificial Sequence: Synthetic epitope
VIEMMADKKY

SEQ ID NO: 53238 - protein, 10 aa, Artificial Sequence
  Description of Artificial Sequence: Synthetic epitope
VIESEDYGQQ

SEQ ID NO: 53239 - protein, 10 aa, Artificial Sequence
  Description of Artificial Sequence: Synthetic epitope
VIESSGAISQ

SEQ ID NO: 53240 - protein, 10 aa, Artificial Sequence
  Description of Artificial Sequence: Synthetic epitope
VIETSLNTAN

SEQ ID NO: 53241 - protein, 10 aa, Artificial Sequence
  Description of Artificial Sequence: Synthetic epitope
VIGKTDVKGF

SEQ ID NO: 53242 - protein, 10 aa, Artificial Sequence
  Description of Artificial Sequence: Synthetic epitope
VIGTTGSSAE

SEQ ID NO: 53243 - protein, 10 aa, Artificial Sequence
  Description of Artificial Sequence: Synthetic epitope
VIHRHILKSK

SEQ ID NO: 53244 - protein, 10 aa, Artificial Sequence
  Description of Artificial Sequence: Synthetic epitope
VIHSLLAEKN

SEQ ID NO: 53245 - protein, 10 aa, Artificial Sequence
  Description of Artificial Sequence: Synthetic epitope
VIIMIQVPQS

SEQ ID NO: 53246 - protein, 10 aa, Artificial Sequence
  Description of Artificial Sequence: Synthetic epitope
VIKDSKLNNT

SEQ ID NO: 53247 - protein, 10 aa, Artificial Sequence
  Description of Artificial Sequence: Synthetic epitope
VIKGPEVKSE

SEQ ID NO: 53248 - protein, 10 aa, Artificial Sequence
  Description of Artificial Sequence: Synthetic epitope
VIKMPMVDPE

SEQ ID NO: 53249 - protein, 10 aa, Artificial Sequence
  Description of Artificial Sequence: Synthetic epitope
VILKAVLENS

SEQ ID NO: 53250 - protein, 10 aa, Artificial Sequence
  Description of Artificial Sequence: Synthetic epitope
VIMEEMKLVD

SEQ ID NO: 53251 - protein, 10 aa, Artificial Sequence
  Description of Artificial Sequence: Synthetic epitope
VIMMPFQFAG

SEQ ID NO: 53252 - protein, 10 aa, Artificial Sequence
  Description of Artificial Sequence: Synthetic epitope
VINLMSSKML

SEQ ID NO: 53253 - protein, 10 aa, Artificial Sequence
  Description of Artificial Sequence: Synthetic epitope
VINTRRIKHH

SEQ ID NO: 53254 - protein, 10 aa, Artificial Sequence
  Description of Artificial Sequence: Synthetic epitope
VIPMLEVRLL

SEQ ID NO: 53255 - protein, 10 aa, Artificial Sequence
  Description of Artificial Sequence: Synthetic epitope
VIPVTSSELT

SEQ ID NO: 53256 - protein, 10 aa, Artificial Sequence
  Description of Artificial Sequence: Synthetic epitope
VIQESKSLLR

SEQ ID NO: 53257 - protein, 10 aa, Artificial Sequence
  Description of Artificial Sequence: Synthetic epitope
VIQKEFIMGL

SEQ ID NO: 53258 - protein, 10 aa, Artificial Sequence
  Description of Artificial Sequence: Synthetic epitope
VIRDNRKAEN

SEQ ID NO: 53259 - protein, 10 aa, Artificial Sequence
  Description of Artificial Sequence: Synthetic epitope
VIRERLSKEK

SEQ ID NO: 53260 - protein, 10 aa, Artificial Sequence
  Description of Artificial Sequence: Synthetic epitope
VIRKNAVMGQ

SEQ ID NO: 53261 - protein, 10 aa, Artificial Sequence
  Description of Artificial Sequence: Synthetic epitope
VIRKTSARVA

SEQ ID NO: 53262 - protein, 10 aa, Artificial Sequence
  Description of Artificial Sequence: Synthetic epitope
VIRTRMIQME

SEQ ID NO: 53263 - protein, 10 aa, Artificial Sequence
  Description of Artificial Sequence: Synthetic epitope
VIRTTPIKPT

SEQ ID NO: 53264 - protein, 10 aa, Artificial Sequence
  Description of Artificial Sequence: Synthetic epitope
VISAGASKEF

SEQ ID NO: 53265 - protein, 10 aa, Artificial Sequence
  Description of Artificial Sequence: Synthetic epitope
VISEDAVLEQ

SEQ ID NO: 53266 - protein, 10 aa, Artificial Sequence
  Description of Artificial Sequence: Synthetic epitope
VISISSNNAV

SEQ ID NO: 53267 - protein, 10 aa, Artificial Sequence
  Description of Artificial Sequence: Synthetic epitope
VISKASAYTG

SEQ ID NO: 53268 - protein, 10 aa, Artificial Sequence
  Description of Artificial Sequence: Synthetic epitope
VISSPSLTSE

SEQ ID NO: 53269 - protein, 10 aa, Artificial Sequence
  Description of Artificial Sequence: Synthetic epitope
VISTIQLADQ

SEQ ID NO: 53270 - protein, 10 aa, Artificial Sequence
  Description of Artificial Sequence: Synthetic epitope
VITAVTLSPS

SEQ ID NO: 53271 - protein, 10 aa, Artificial Sequence
  Description of Artificial Sequence: Synthetic epitope
VITLGSLRLD

SEQ ID NO: 53272 - protein, 10 aa, Artificial Sequence
  Description of Artificial Sequence: Synthetic epitope
VITNSVKRAS

SEQ ID NO: 53273 - protein, 10 aa, Artificial Sequence
  Description of Artificial Sequence: Synthetic epitope
VITVLTRSKR

SEQ ID NO: 53274 - protein, 10 aa, Artificial Sequence
  Description of Artificial Sequence: Synthetic epitope
VITWERIISH

SEQ ID NO: 53275 - protein, 10 aa, Artificial Sequence
  Description of Artificial Sequence: Synthetic epitope
VIVGREADSS

SEQ ID NO: 53276 - protein, 10 aa, Artificial Sequence
  Description of Artificial Sequence: Synthetic epitope
VIVKEKKRNS

SEQ ID NO: 53277 - protein, 10 aa, Artificial Sequence
  Description of Artificial Sequence: Synthetic epitope
VIVKEVKKVE

SEQ ID NO: 53278 - protein, 10 aa, Artificial Sequence
  Description of Artificial Sequence: Synthetic epitope
VIVKNQLDMF

SEQ ID NO: 53279 - protein, 10 aa, Artificial Sequence
  Description of Artificial Sequence: Synthetic epitope
VIVKSQEKIF

SEQ ID NO: 53280 - protein, 10 aa, Artificial Sequence
  Description of Artificial Sequence: Synthetic epitope
VIVKTEQTEP

SEQ ID NO: 53281 - protein, 10 aa, Artificial Sequence
  Description of Artificial Sequence: Synthetic epitope
VIWNQASINY

SEQ ID NO: 53282 - protein, 10 aa, Artificial Sequence
  Description of Artificial Sequence: Synthetic epitope
VKAAQLVQLQ

SEQ ID NO: 53283 - protein, 10 aa, Artificial Sequence
  Description of Artificial Sequence: Synthetic epitope
VKAATERLSL

SEQ ID NO: 53284 - protein, 10 aa, Artificial Sequence
  Description of Artificial Sequence: Synthetic epitope
VKADTNGIIK

SEQ ID NO: 53285 - protein, 10 aa, Artificial Sequence
  Description of Artificial Sequence: Synthetic epitope
VKAEKASSYQ

SEQ ID NO: 53286 - protein, 10 aa, Artificial Sequence
  Description of Artificial Sequence: Synthetic epitope
VKAKALEYVE

SEQ ID NO: 53287 - protein, 10 aa, Artificial Sequence
  Description of Artificial Sequence: Synthetic epitope
VKAKIMNETR

SEQ ID NO: 53288 - protein, 10 aa, Artificial Sequence
  Description of Artificial Sequence: Synthetic epitope
VKAKTDTAFK

SEQ ID NO: 53289 - protein, 10 aa, Artificial Sequence
  Description of Artificial Sequence: Synthetic epitope
VKALKASAEF

SEQ ID NO: 53290 - protein, 10 aa, Artificial Sequence
  Description of Artificial Sequence: Synthetic epitope
VKANDAYLQM

SEQ ID NO: 53291 - protein, 10 aa, Artificial Sequence
  Description of Artificial Sequence: Synthetic epitope
VKAVNKASST

SEQ ID NO: 53292 - protein, 10 aa, Artificial Sequence
  Description of Artificial Sequence: Synthetic epitope
VKAVSETPAV

SEQ ID NO: 53293 - protein, 10 aa, Artificial Sequence
  Description of Artificial Sequence: Synthetic epitope
VKDETATMKD

SEQ ID NO: 53294 - protein, 10 aa, Artificial Sequence
  Description of Artificial Sequence: Synthetic epitope
VKDISEVVTP

SEQ ID NO: 53295 - protein, 10 aa, Artificial Sequence
  Description of Artificial Sequence: Synthetic epitope
VKDMSTVQMG

SEQ ID NO: 53296 - protein, 10 aa, Artificial Sequence
  Description of Artificial Sequence: Synthetic epitope
VKDQERRQAA

SEQ ID NO: 53297 - protein, 10 aa, Artificial Sequence
  Description of Artificial Sequence: Synthetic epitope
VKDTHEKSKK

SEQ ID NO: 53298 - protein, 10 aa, Artificial Sequence
  Description of Artificial Sequence: Synthetic epitope
VKEDEVVSSE

SEQ ID NO: 53299 - protein, 10 aa, Artificial Sequence
  Description of Artificial Sequence: Synthetic epitope
VKEKELSIEL

SEQ ID NO: 53300 - protein, 10 aa, Artificial Sequence
  Description of Artificial Sequence: Synthetic epitope
VKEKESTGTD

SEQ ID NO: 53301 - protein, 10 aa, Artificial Sequence
  Description of Artificial Sequence: Synthetic epitope
VKEKMVSNTK

SEQ ID NO: 53302 - protein, 10 aa, Artificial Sequence
  Description of Artificial Sequence: Synthetic epitope
VKEKQDYKQK

SEQ ID NO: 53303 - protein, 10 aa, Artificial Sequence
  Description of Artificial Sequence: Synthetic epitope
VKERESERNQ

SEQ ID NO: 53304 - protein, 10 aa, Artificial Sequence
  Description of Artificial Sequence: Synthetic epitope
VKESAEVEEI

SEQ ID NO: 53305 - protein, 10 aa, Artificial Sequence
  Description of Artificial Sequence: Synthetic epitope
VKEVVQNFAK

SEQ ID NO: 53306 - protein, 10 aa, Artificial Sequence
  Description of Artificial Sequence: Synthetic epitope
VKFESESELQ

SEQ ID NO: 53307 - protein, 10 aa, Artificial Sequence
  Description of Artificial Sequence: Synthetic epitope
VKFESKERTA

SEQ ID NO: 53308 - protein, 10 aa, Artificial Sequence
  Description of Artificial Sequence: Synthetic epitope
VKFQRAITGA

SEQ ID NO: 53309 - protein, 10 aa, Artificial Sequence
  Description of Artificial Sequence: Synthetic epitope
VKFRSLSMVS

SEQ ID NO: 53310 - protein, 10 aa, Artificial Sequence
  Description of Artificial Sequence: Synthetic epitope
VKFSTLTKEL

SEQ ID NO: 53311 - protein, 10 aa, Artificial Sequence
  Description of Artificial Sequence: Synthetic epitope
VKFVDRQQAE

SEQ ID NO: 53312 - protein, 10 aa, Artificial Sequence
  Description of Artificial Sequence: Synthetic epitope
VKGDSGVLNE

SEQ ID NO: 53313 - protein, 10 aa, Artificial Sequence
  Description of Artificial Sequence: Synthetic epitope
VKGLESQVLD

SEQ ID NO: 53314 - protein, 10 aa, Artificial Sequence
  Description of Artificial Sequence: Synthetic epitope
VKGMRELREV

SEQ ID NO: 53315 - protein, 10 aa, Artificial Sequence
  Description of Artificial Sequence: Synthetic epitope
VKGSFETEES

SEQ ID NO: 53316 - protein, 10 aa, Artificial Sequence
  Description of Artificial Sequence: Synthetic epitope
VKGSTEKNKL

SEQ ID NO: 53317 - protein, 10 aa, Artificial Sequence
  Description of Artificial Sequence: Synthetic epitope
VKGTESQMRG

SEQ ID NO: 53318 - protein, 10 aa, Artificial Sequence
  Description of Artificial Sequence: Synthetic epitope
VKHEAVSDQT

SEQ ID NO: 53319 - protein, 10 aa, Artificial Sequence
  Description of Artificial Sequence: Synthetic epitope
VKHSKLIEHI

SEQ ID NO: 53320 - protein, 10 aa, Artificial Sequence
  Description of Artificial Sequence: Synthetic epitope
VKIGEMPLTD

SEQ ID NO: 53321 - protein, 10 aa, Artificial Sequence
  Description of Artificial Sequence: Synthetic epitope
VKIIQAAINS

SEQ ID NO: 53322 - protein, 10 aa, Artificial Sequence
  Description of Artificial Sequence: Synthetic epitope
VKIKLADSAL

SEQ ID NO: 53323 - protein, 10 aa, Artificial Sequence
  Description of Artificial Sequence: Synthetic epitope
VKIKRIRREL

SEQ ID NO: 53324 - protein, 10 aa, Artificial Sequence
  Description of Artificial Sequence: Synthetic epitope
VKILKQLSLL

SEQ ID NO: 53325 - protein, 10 aa, Artificial Sequence
  Description of Artificial Sequence: Synthetic epitope
VKILQSLSAA

SEQ ID NO: 53326 - protein, 10 aa, Artificial Sequence
  Description of Artificial Sequence: Synthetic epitope
VKILTTKQSS

SEQ ID NO: 53327 - protein, 10 aa, Artificial Sequence
  Description of Artificial Sequence: Synthetic epitope
VKIVKIHPLE

SEQ ID NO: 53328 - protein, 10 aa, Artificial Sequence
  Description of Artificial Sequence: Synthetic epitope
VKIVTVKTQA

SEQ ID NO: 53329 - protein, 10 aa, Artificial Sequence
  Description of Artificial Sequence: Synthetic epitope
VKKEEVIHGD

SEQ ID NO: 53330 - protein, 10 aa, Artificial Sequence
  Description of Artificial Sequence: Synthetic epitope
VKKETFRSPQ

SEQ ID NO: 53331 - protein, 10 aa, Artificial Sequence
  Description of Artificial Sequence: Synthetic epitope
VKKHAAQRST

SEQ ID NO: 53332 - protein, 10 aa, Artificial Sequence
  Description of Artificial Sequence: Synthetic epitope
VKKINHTASE

SEQ ID NO: 53333 - protein, 10 aa, Artificial Sequence
  Description of Artificial Sequence: Synthetic epitope
VKKQLAMTEE

SEQ ID NO: 53334 - protein, 10 aa, Artificial Sequence
  Description of Artificial Sequence: Synthetic epitope
VKKQSRSEAM

SEQ ID NO: 53335 - protein, 10 aa, Artificial Sequence
  Description of Artificial Sequence: Synthetic epitope
VKKRRKVQTD

SEQ ID NO: 53336 - protein, 10 aa, Artificial Sequence
  Description of Artificial Sequence: Synthetic epitope
VKKSHGKMWS

SEQ ID NO: 53337 - protein, 10 aa, Artificial Sequence
  Description of Artificial Sequence: Synthetic epitope
VKKSTQERFA

SEQ ID NO: 53338 - protein, 10 aa, Artificial Sequence
  Description of Artificial Sequence: Synthetic epitope
VKKTEMDKSP

SEQ ID NO: 53339 - protein, 10 aa, Artificial Sequence
  Description of Artificial Sequence: Synthetic epitope
VKLAEATRTN

SEQ ID NO: 53340 - protein, 10 aa, Artificial Sequence
  Description of Artificial Sequence: Synthetic epitope
VKLDKKLREN

SEQ ID NO: 53341 - protein, 10 aa, Artificial Sequence
  Description of Artificial Sequence: Synthetic epitope
VKLGLINREA

SEQ ID NO: 53342 - protein, 10 aa, Artificial Sequence
  Description of Artificial Sequence: Synthetic epitope
VKLIAALKNL

SEQ ID NO: 53343 - protein, 10 aa, Artificial Sequence
  Description of Artificial Sequence: Synthetic epitope
VKLIQRSSPE

SEQ ID NO: 53344 - protein, 10 aa, Artificial Sequence
  Description of Artificial Sequence: Synthetic epitope
VKLKEFQQKK

SEQ ID NO: 53345 - protein, 10 aa, Artificial Sequence
  Description of Artificial Sequence: Synthetic epitope
VKLKKIVTLP

SEQ ID NO: 53346 - protein, 10 aa, Artificial Sequence
  Description of Artificial Sequence: Synthetic epitope
VKLKKVSQDL

SEQ ID NO: 53347 - protein, 10 aa, Artificial Sequence
  Description of Artificial Sequence: Synthetic epitope
VKLLVTASMP

SEQ ID NO: 53348 - protein, 10 aa, Artificial Sequence
  Description of Artificial Sequence: Synthetic epitope
VKLNKASINM

SEQ ID NO: 53349 - protein, 10 aa, Artificial Sequence
  Description of Artificial Sequence: Synthetic epitope
VKLQQTYAAL

SEQ ID NO: 53350 - protein, 10 aa, Artificial Sequence
  Description of Artificial Sequence: Synthetic epitope
VKLQRKLPVE

SEQ ID NO: 53351 - protein, 10 aa, Artificial Sequence
  Description of Artificial Sequence: Synthetic epitope
VKLRHSEREM

SEQ ID NO: 53352 - protein, 10 aa, Artificial Sequence
  Description of Artificial Sequence: Synthetic epitope
VKLRISKRSG

SEQ ID NO: 53353 - protein, 10 aa, Artificial Sequence
  Description of Artificial Sequence: Synthetic epitope
VKLRSVVKEA

SEQ ID NO: 53354 - protein, 10 aa, Artificial Sequence
  Description of Artificial Sequence: Synthetic epitope
VKLSALMVAT

SEQ ID NO: 53355 - protein, 10 aa, Artificial Sequence
  Description of Artificial Sequence: Synthetic epitope
VKLSENMKAS

SEQ ID NO: 53356 - protein, 10 aa, Artificial Sequence
  Description of Artificial Sequence: Synthetic epitope
VKLVSVLSTI

SEQ ID NO: 53357 - protein, 10 aa, Artificial Sequence
  Description of Artificial Sequence: Synthetic epitope
VKMASELLFQ

SEQ ID NO: 53358 - protein, 10 aa, Artificial Sequence
  Description of Artificial Sequence: Synthetic epitope
VKNEAVKQQD

SEQ ID NO: 53359 - protein, 10 aa, Artificial Sequence
  Description of Artificial Sequence: Synthetic epitope
VKNIAKTESS

SEQ ID NO: 53360 - protein, 10 aa, Artificial Sequence
  Description of Artificial Sequence: Synthetic epitope
VKNIDQVSSE

SEQ ID NO: 53361 - protein, 10 aa, Artificial Sequence
  Description of Artificial Sequence: Synthetic epitope
VKNIDQVSSE

SEQ ID NO: 53362 - protein, 10 aa, Artificial Sequence
  Description of Artificial Sequence: Synthetic epitope
VKNILQEVRQ

SEQ ID NO: 53363 - protein, 10 aa, Artificial Sequence
  Description of Artificial Sequence: Synthetic epitope
VKNKALRLEE

SEQ ID NO: 53364 - protein, 10 aa, Artificial Sequence
  Description of Artificial Sequence: Synthetic epitope
VKPAAVLSKG

SEQ ID NO: 53365 - protein, 10 aa, Artificial Sequence
  Description of Artificial Sequence: Synthetic epitope
VKPVTESEQP

SEQ ID NO: 53366 - protein, 10 aa, Artificial Sequence
  Description of Artificial Sequence: Synthetic epitope
VKQEAAGKQQ

SEQ ID NO: 53367 - protein, 10 aa, Artificial Sequence
  Description of Artificial Sequence: Synthetic epitope
VKQEYTHKAG

SEQ ID NO: 53368 - protein, 10 aa, Artificial Sequence
  Description of Artificial Sequence: Synthetic epitope
VKQFDASTPK

SEQ ID NO: 53369 - protein, 10 aa, Artificial Sequence
  Description of Artificial Sequence: Synthetic epitope
VKQGFALSTL

SEQ ID NO: 53370 - protein, 10 aa, Artificial Sequence
  Description of Artificial Sequence: Synthetic epitope
VKQGLEVKEA

SEQ ID NO: 53371 - protein, 10 aa, Artificial Sequence
  Description of Artificial Sequence: Synthetic epitope
VKQKAPNSHS

SEQ ID NO: 53372 - protein, 10 aa, Artificial Sequence
  Description of Artificial Sequence: Synthetic epitope
VKQKSSRKKV

SEQ ID NO: 53373 - protein, 10 aa, Artificial Sequence
  Description of Artificial Sequence: Synthetic epitope
VKQNSVLMEE

SEQ ID NO: 53374 - protein, 10 aa, Artificial Sequence
  Description of Artificial Sequence: Synthetic epitope
VKQSSKERLA

SEQ ID NO: 53375 - protein, 10 aa, Artificial Sequence
  Description of Artificial Sequence: Synthetic epitope
VKRAAQALDQ

SEQ ID NO: 53376 - protein, 10 aa, Artificial Sequence
  Description of Artificial Sequence: Synthetic epitope
VKRKIRDESL

SEQ ID NO: 53377 - protein, 10 aa, Artificial Sequence
  Description of Artificial Sequence: Synthetic epitope
VKRKKISEES

SEQ ID NO: 53378 - protein, 10 aa, Artificial Sequence
  Description of Artificial Sequence: Synthetic epitope
VKRLESSWHG

SEQ ID NO: 53379 - protein, 10 aa, Artificial Sequence
  Description of Artificial Sequence: Synthetic epitope
VKRQSSTPSA

SEQ ID NO: 53380 - protein, 10 aa, Artificial Sequence
  Description of Artificial Sequence: Synthetic epitope
VKRYPRSAYP

SEQ ID NO: 53381 - protein, 10 aa, Artificial Sequence
  Description of Artificial Sequence: Synthetic epitope
VKSEALAKMW

SEQ ID NO: 53382 - protein, 10 aa, Artificial Sequence
  Description of Artificial Sequence: Synthetic epitope
VKSGQSDSDQ

SEQ ID NO: 53383 - protein, 10 aa, Artificial Sequence
  Description of Artificial Sequence: Synthetic epitope
VKSGVVTKRS

SEQ ID NO: 53384 - protein, 10 aa, Artificial Sequence
  Description of Artificial Sequence: Synthetic epitope
VKSKSESETY

SEQ ID NO: 53385 - protein, 10 aa, Artificial Sequence
  Description of Artificial Sequence: Synthetic epitope
VKSLPMRAQF

SEQ ID NO: 53386 - protein, 10 aa, Artificial Sequence
  Description of Artificial Sequence: Synthetic epitope
VKSMQEKTVV

SEQ ID NO: 53387 - protein, 10 aa, Artificial Sequence
  Description of Artificial Sequence: Synthetic epitope
VKSPLSLIAR

SEQ ID NO: 53388 - protein, 10 aa, Artificial Sequence
  Description of Artificial Sequence: Synthetic epitope
VKSQEVINAK

SEQ ID NO: 53389 - protein, 10 aa, Artificial Sequence
  Description of Artificial Sequence: Synthetic epitope
VKSQQSTLVT

SEQ ID NO: 53390 - protein, 10 aa, Artificial Sequence
  Description of Artificial Sequence: Synthetic epitope
VKSQSKSNTS

SEQ ID NO: 53391 - protein, 10 aa, Artificial Sequence
  Description of Artificial Sequence: Synthetic epitope
VKSREKKMSK

SEQ ID NO: 53392 - protein, 10 aa, Artificial Sequence
  Description of Artificial Sequence: Synthetic epitope
VKSSEANSPA

SEQ ID NO: 53393 - protein, 10 aa, Artificial Sequence
  Description of Artificial Sequence: Synthetic epitope
VKSSEKTQIA

SEQ ID NO: 53394 - protein, 10 aa, Artificial Sequence
  Description of Artificial Sequence: Synthetic epitope
VKSSLADSDH

SEQ ID NO: 53395 - protein, 10 aa, Artificial Sequence
  Description of Artificial Sequence: Synthetic epitope
VKSTLSQTVP

SEQ ID NO: 53396 - protein, 10 aa, Artificial Sequence
  Description of Artificial Sequence: Synthetic epitope
VKSTQLAQDI

SEQ ID NO: 53397 - protein, 10 aa, Artificial Sequence
  Description of Artificial Sequence: Synthetic epitope
VKSVSESHTS

SEQ ID NO: 53398 - protein, 10 aa, Artificial Sequence
  Description of Artificial Sequence: Synthetic epitope
VKTAVSVTQG

SEQ ID NO: 53399 - protein, 10 aa, Artificial Sequence
  Description of Artificial Sequence: Synthetic epitope
VKTEPKSSDD

SEQ ID NO: 53400 - protein, 10 aa, Artificial Sequence
  Description of Artificial Sequence: Synthetic epitope
VKTKMDQADD

SEQ ID NO: 53401 - protein, 10 aa, Artificial Sequence
  Description of Artificial Sequence: Synthetic epitope
VKTLPILLKS

SEQ ID NO: 53402 - protein, 10 aa, Artificial Sequence
  Description of Artificial Sequence: Synthetic epitope
VKTMSEGTLA

SEQ ID NO: 53403 - protein, 10 aa, Artificial Sequence
  Description of Artificial Sequence: Synthetic epitope
VKTNALKEEK

SEQ ID NO: 53404 - protein, 10 aa, Artificial Sequence
  Description of Artificial Sequence: Synthetic epitope
VKTSDNKSQS

SEQ ID NO: 53405 - protein, 10 aa, Artificial Sequence
  Description of Artificial Sequence: Synthetic epitope
VKTSVTTSIS

SEQ ID NO: 53406 - protein, 10 aa, Artificial Sequence
  Description of Artificial Sequence: Synthetic epitope
VKTTSLTEKK

SEQ ID NO: 53407 - protein, 10 aa, Artificial Sequence
  Description of Artificial Sequence: Synthetic epitope
VKVATSLQRS

SEQ ID NO: 53408 - protein, 10 aa, Artificial Sequence
  Description of Artificial Sequence: Synthetic epitope
VKVELASGVS

SEQ ID NO: 53409 - protein, 10 aa, Artificial Sequence
  Description of Artificial Sequence: Synthetic epitope
VKVHENVEKE

SEQ ID NO: 53410 - protein, 10 aa, Artificial Sequence
  Description of Artificial Sequence: Synthetic epitope
VKVSKYWYLG

SEQ ID NO: 53411 - protein, 10 aa, Artificial Sequence
  Description of Artificial Sequence: Synthetic epitope
VKWDTFVSQE

SEQ ID NO: 53412 - protein, 10 aa, Artificial Sequence
  Description of Artificial Sequence: Synthetic epitope
VKYAASGQES

SEQ ID NO: 53413 - protein, 10 aa, Artificial Sequence
  Description of Artificial Sequence: Synthetic epitope
VLADSVDLQE

SEQ ID NO: 53414 - protein, 10 aa, Artificial Sequence
  Description of Artificial Sequence: Synthetic epitope
VLAFVVRQQH

SEQ ID NO: 53415 - protein, 10 aa, Artificial Sequence
  Description of Artificial Sequence: Synthetic epitope
VLAKARNSRK

SEQ ID NO: 53416 - protein, 10 aa, Artificial Sequence
  Description of Artificial Sequence: Synthetic epitope
VLAKKATEMG

SEQ ID NO: 53417 - protein, 10 aa, Artificial Sequence
  Description of Artificial Sequence: Synthetic epitope
VLASKTKTKK

SEQ ID NO: 53418 - protein, 10 aa, Artificial Sequence
  Description of Artificial Sequence: Synthetic epitope
VLASQASGQP

SEQ ID NO: 53419 - protein, 10 aa, Artificial Sequence
  Description of Artificial Sequence: Synthetic epitope
VLATSISPEQ

SEQ ID NO: 53420 - protein, 10 aa, Artificial Sequence
  Description of Artificial Sequence: Synthetic epitope
VLDASLLQKQ

SEQ ID NO: 53421 - protein, 10 aa, Artificial Sequence
  Description of Artificial Sequence: Synthetic epitope
VLDFILSMGL

SEQ ID NO: 53422 - protein, 10 aa, Artificial Sequence
  Description of Artificial Sequence: Synthetic epitope
VLDSLQSKAK

SEQ ID NO: 53423 - protein, 10 aa, Artificial Sequence
  Description of Artificial Sequence: Synthetic epitope
VLEALSAIIA

SEQ ID NO: 53424 - protein, 10 aa, Artificial Sequence
  Description of Artificial Sequence: Synthetic epitope
VLEFASKENF

SEQ ID NO: 53425 - protein, 10 aa, Artificial Sequence
  Description of Artificial Sequence: Synthetic epitope
VLEILQVKDA

SEQ ID NO: 53426 - protein, 10 aa, Artificial Sequence
  Description of Artificial Sequence: Synthetic epitope
VLEPSMSSPS

SEQ ID NO: 53427 - protein, 10 aa, Artificial Sequence
  Description of Artificial Sequence: Synthetic epitope
VLERRARTKR

SEQ ID NO: 53428 - protein, 10 aa, Artificial Sequence
  Description of Artificial Sequence: Synthetic epitope
VLESKLTEFH

SEQ ID NO: 53429 - protein, 10 aa, Artificial Sequence
  Description of Artificial Sequence: Synthetic epitope
VLESLALEVP

SEQ ID NO: 53430 - protein, 10 aa, Artificial Sequence
  Description of Artificial Sequence: Synthetic epitope
VLESVTLEPE

SEQ ID NO: 53431 - protein, 10 aa, Artificial Sequence
  Description of Artificial Sequence: Synthetic epitope
VLETRESNQV

SEQ ID NO: 53432 - protein, 10 aa, Artificial Sequence
  Description of Artificial Sequence: Synthetic epitope
VLEVSQEMIS

SEQ ID NO: 53433 - protein, 10 aa, Artificial Sequence
  Description of Artificial Sequence: Synthetic epitope
VLFAEAAQAG

SEQ ID NO: 53434 - protein, 10 aa, Artificial Sequence
  Description of Artificial Sequence: Synthetic epitope
VLFERVLTSG

SEQ ID NO: 53435 - protein, 10 aa, Artificial Sequence
  Description of Artificial Sequence: Synthetic epitope
VLGAESHASK

SEQ ID NO: 53436 - protein, 10 aa, Artificial Sequence
  Description of Artificial Sequence: Synthetic epitope
VLGETLVAEA

SEQ ID NO: 53437 - protein, 10 aa, Artificial Sequence
  Description of Artificial Sequence: Synthetic epitope
VLGRNFKMDR

SEQ ID NO: 53438 - protein, 10 aa, Artificial Sequence
  Description of Artificial Sequence: Synthetic epitope
VLHSASSGVE

SEQ ID NO: 53439 - protein, 10 aa, Artificial Sequence
  Description of Artificial Sequence: Synthetic epitope
VLIDPVSVQD

SEQ ID NO: 53440 - protein, 10 aa, Artificial Sequence
  Description of Artificial Sequence: Synthetic epitope
VLIDVLAEEA

SEQ ID NO: 53441 - protein, 10 aa, Artificial Sequence
  Description of Artificial Sequence: Synthetic epitope
VLKGTKTKSK

SEQ ID NO: 53442 - protein, 10 aa, Artificial Sequence
  Description of Artificial Sequence: Synthetic epitope
VLKHTAFAHL

SEQ ID NO: 53443 - protein, 10 aa, Artificial Sequence
  Description of Artificial Sequence: Synthetic epitope
VLKKARTNLE

SEQ ID NO: 53444 - protein, 10 aa, Artificial Sequence
  Description of Artificial Sequence: Synthetic epitope
VLKLQLAPSP

SEQ ID NO: 53445 - protein, 10 aa, Artificial Sequence
  Description of Artificial Sequence: Synthetic epitope
VLKMAASSVK

SEQ ID NO: 53446 - protein, 10 aa, Artificial Sequence
  Description of Artificial Sequence: Synthetic epitope
VLKQEARTRE

SEQ ID NO: 53447 - protein, 10 aa, Artificial Sequence
  Description of Artificial Sequence: Synthetic epitope
VLLEKDKVNN

SEQ ID NO: 53448 - protein, 10 aa, Artificial Sequence
  Description of Artificial Sequence: Synthetic epitope
VLLFKMISTR

SEQ ID NO: 53449 - protein, 10 aa, Artificial Sequence
  Description of Artificial Sequence: Synthetic epitope
VLLIESLATM

SEQ ID NO: 53450 - protein, 10 aa, Artificial Sequence
  Description of Artificial Sequence: Synthetic epitope
VLLSRSQQTQ

SEQ ID NO: 53451 - protein, 10 aa, Artificial Sequence
  Description of Artificial Sequence: Synthetic epitope
VLLVMSKAKR

SEQ ID NO: 53452 - protein, 10 aa, Artificial Sequence
  Description of Artificial Sequence: Synthetic epitope
VLLYAHVNFA

SEQ ID NO: 53453 - protein, 10 aa, Artificial Sequence
  Description of Artificial Sequence: Synthetic epitope
VLMAANQSQL

SEQ ID NO: 53454 - protein, 10 aa, Artificial Sequence
  Description of Artificial Sequence: Synthetic epitope
VLMTSSELNV

SEQ ID NO: 53455 - protein, 10 aa, Artificial Sequence
  Description of Artificial Sequence: Synthetic epitope
VLNDVYRVMA

SEQ ID NO: 53456 - protein, 10 aa, Artificial Sequence
  Description of Artificial Sequence: Synthetic epitope
VLNKSNEGKE

SEQ ID NO: 53457 - protein, 10 aa, Artificial Sequence
  Description of Artificial Sequence: Synthetic epitope
VLNLIINNGN

SEQ ID NO: 53458 - protein, 10 aa, Artificial Sequence
  Description of Artificial Sequence: Synthetic epitope
VLNTQLSSEN

SEQ ID NO: 53459 - protein, 10 aa, Artificial Sequence
  Description of Artificial Sequence: Synthetic epitope
VLNVTGVTQS

SEQ ID NO: 53460 - protein, 10 aa, Artificial Sequence
  Description of Artificial Sequence: Synthetic epitope
VLQDEKLELE

SEQ ID NO: 53461 - protein, 10 aa, Artificial Sequence
  Description of Artificial Sequence: Synthetic epitope
VLQFKNKKLA

SEQ ID NO: 53462 - protein, 10 aa, Artificial Sequence
  Description of Artificial Sequence: Synthetic epitope
VLQNGQSDQS

SEQ ID NO: 53463 - protein, 10 aa, Artificial Sequence
  Description of Artificial Sequence: Synthetic epitope
VLQNIQADPT

SEQ ID NO: 53464 - protein, 10 aa, Artificial Sequence
  Description of Artificial Sequence: Synthetic epitope
VLQPSMIVSE

SEQ ID NO: 53465 - protein, 10 aa, Artificial Sequence
  Description of Artificial Sequence: Synthetic epitope
VLQSSLSQEH

SEQ ID NO: 53466 - protein, 10 aa, Artificial Sequence
  Description of Artificial Sequence: Synthetic epitope
VLQTRMNDLH

SEQ ID NO: 53467 - protein, 10 aa, Artificial Sequence
  Description of Artificial Sequence: Synthetic epitope
VLQTSWAKGR

SEQ ID NO: 53468 - protein, 10 aa, Artificial Sequence
  Description of Artificial Sequence: Synthetic epitope
VLRGENASAK

SEQ ID NO: 53469 - protein, 10 aa, Artificial Sequence
  Description of Artificial Sequence: Synthetic epitope
VLRLSEAYSR

SEQ ID NO: 53470 - protein, 10 aa, Artificial Sequence
  Description of Artificial Sequence: Synthetic epitope
VLRQIEAQGS

SEQ ID NO: 53471 - protein, 10 aa, Artificial Sequence
  Description of Artificial Sequence: Synthetic epitope
VLRRQNMGQH

SEQ ID NO: 53472 - protein, 10 aa, Artificial Sequence
  Description of Artificial Sequence: Synthetic epitope
VLRRTVQTRP

SEQ ID NO: 53473 - protein, 10 aa, Artificial Sequence
  Description of Artificial Sequence: Synthetic epitope
VLRSAALAPT

SEQ ID NO: 53474 - protein, 10 aa, Artificial Sequence
  Description of Artificial Sequence: Synthetic epitope
VLRSAETMQS

SEQ ID NO: 53475 - protein, 10 aa, Artificial Sequence
  Description of Artificial Sequence: Synthetic epitope
VLRTTSKING

SEQ ID NO: 53476 - protein, 10 aa, Artificial Sequence
  Description of Artificial Sequence: Synthetic epitope
VLSATEASNI

SEQ ID NO: 53477 - protein, 10 aa, Artificial Sequence
  Description of Artificial Sequence: Synthetic epitope
VLSDEEAVEL

SEQ ID NO: 53478 - protein, 10 aa, Artificial Sequence
  Description of Artificial Sequence: Synthetic epitope
VLSDSNTRSE

SEQ ID NO: 53479 - protein, 10 aa, Artificial Sequence
  Description of Artificial Sequence: Synthetic epitope
VLSEMQVIEQ

SEQ ID NO: 53480 - protein, 10 aa, Artificial Sequence
  Description of Artificial Sequence: Synthetic epitope
VLSESGVSVK

SEQ ID NO: 53481 - protein, 10 aa, Artificial Sequence
  Description of Artificial Sequence: Synthetic epitope
VLSETVSAAQ

SEQ ID NO: 53482 - protein, 10 aa, Artificial Sequence
  Description of Artificial Sequence: Synthetic epitope
VLSIRGAQEE

SEQ ID NO: 53483 - protein, 10 aa, Artificial Sequence
  Description of Artificial Sequence: Synthetic epitope
VLSKKGFDDS

SEQ ID NO: 53484 - protein, 10 aa, Artificial Sequence
  Description of Artificial Sequence: Synthetic epitope
VLSKSELLTK

SEQ ID NO: 53485 - protein, 10 aa, Artificial Sequence
  Description of Artificial Sequence: Synthetic epitope
VLSKTKEAGK

SEQ ID NO: 53486 - protein, 10 aa, Artificial Sequence
  Description of Artificial Sequence: Synthetic epitope
VLSLARSSLH

SEQ ID NO: 53487 - protein, 10 aa, Artificial Sequence
  Description of Artificial Sequence: Synthetic epitope
VLSMPSSVTS

SEQ ID NO: 53488 - protein, 10 aa, Artificial Sequence
  Description of Artificial Sequence: Synthetic epitope
VLSQSKKLLF

SEQ ID NO: 53489 - protein, 10 aa, Artificial Sequence
  Description of Artificial Sequence: Synthetic epitope
VLSRLSLMAM

SEQ ID NO: 53490 - protein, 10 aa, Artificial Sequence
  Description of Artificial Sequence: Synthetic epitope
VLSSLVKKNI

SEQ ID NO: 53491 - protein, 10 aa, Artificial Sequence
  Description of Artificial Sequence: Synthetic epitope
VLSSMADAVL

SEQ ID NO: 53492 - protein, 10 aa, Artificial Sequence
  Description of Artificial Sequence: Synthetic epitope
VLSSREDKDM

SEQ ID NO: 53493 - protein, 10 aa, Artificial Sequence
  Description of Artificial Sequence: Synthetic epitope
VLTAAVTQAS

SEQ ID NO: 53494 - protein, 10 aa, Artificial Sequence
  Description of Artificial Sequence: Synthetic epitope
VLTEISIKAK

SEQ ID NO: 53495 - protein, 10 aa, Artificial Sequence
  Description of Artificial Sequence: Synthetic epitope
VLTIQSSATP

SEQ ID NO: 53496 - protein, 10 aa, Artificial Sequence
  Description of Artificial Sequence: Synthetic epitope
VLTNGEAAMQ

SEQ ID NO: 53497 - protein, 10 aa, Artificial Sequence
  Description of Artificial Sequence: Synthetic epitope
VLTPSEAYEE

SEQ ID NO: 53498 - protein, 10 aa, Artificial Sequence
  Description of Artificial Sequence: Synthetic epitope
VLTQAITGQV

SEQ ID NO: 53499 - protein, 10 aa, Artificial Sequence
  Description of Artificial Sequence: Synthetic epitope
VLTQASNPVV

SEQ ID NO: 53500 - protein, 10 aa, Artificial Sequence
  Description of Artificial Sequence: Synthetic epitope
VLTQATSQDT

SEQ ID NO: 53501 - protein, 10 aa, Artificial Sequence
  Description of Artificial Sequence: Synthetic epitope
VLTQIILKTI

SEQ ID NO: 53502 - protein, 10 aa, Artificial Sequence
  Description of Artificial Sequence: Synthetic epitope
VLTSLALIKK

SEQ ID NO: 53503 - protein, 10 aa, Artificial Sequence
  Description of Artificial Sequence: Synthetic epitope
VLTVKEVKGH

SEQ ID NO: 53504 - protein, 10 aa, Artificial Sequence
  Description of Artificial Sequence: Synthetic epitope
VLVSNASEDT

SEQ ID NO: 53505 - protein, 10 aa, Artificial Sequence
  Description of Artificial Sequence: Synthetic epitope
VLWQWTKVKM

SEQ ID NO: 53506 - protein, 10 aa, Artificial Sequence
  Description of Artificial Sequence: Synthetic epitope
VMATTSASLK

SEQ ID NO: 53507 - protein, 10 aa, Artificial Sequence
  Description of Artificial Sequence: Synthetic epitope
VMAVDALASS

SEQ ID NO: 53508 - protein, 10 aa, Artificial Sequence
  Description of Artificial Sequence: Synthetic epitope
VMAVVDKAAE

SEQ ID NO: 53509 - protein, 10 aa, Artificial Sequence
  Description of Artificial Sequence: Synthetic epitope
VMDSALEALS

SEQ ID NO: 53510 - protein, 10 aa, Artificial Sequence
  Description of Artificial Sequence: Synthetic epitope
VMESSILNKM

SEQ ID NO: 53511 - protein, 10 aa, Artificial Sequence
  Description of Artificial Sequence: Synthetic epitope
VMESSQPAQA

SEQ ID NO: 53512 - protein, 10 aa, Artificial Sequence
  Description of Artificial Sequence: Synthetic epitope
VMHKSLDNMP

SEQ ID NO: 53513 - protein, 10 aa, Artificial Sequence
  Description of Artificial Sequence: Synthetic epitope
VMKDAKTKKV

SEQ ID NO: 53514 - protein, 10 aa, Artificial Sequence
  Description of Artificial Sequence: Synthetic epitope
VMKEEVLARD

SEQ ID NO: 53515 - protein, 10 aa, Artificial Sequence
  Description of Artificial Sequence: Synthetic epitope
VMKSASTEEL

SEQ ID NO: 53516 - protein, 10 aa, Artificial Sequence
  Description of Artificial Sequence: Synthetic epitope
VMKSLSVSSD

SEQ ID NO: 53517 - protein, 10 aa, Artificial Sequence
  Description of Artificial Sequence: Synthetic epitope
VMKYEKRNTN

SEQ ID NO: 53518 - protein, 10 aa, Artificial Sequence
  Description of Artificial Sequence: Synthetic epitope
VMLSQHSKAH

SEQ ID NO: 53519 - protein, 10 aa, Artificial Sequence
  Description of Artificial Sequence: Synthetic epitope
VMMFGSTAIA

SEQ ID NO: 53520 - protein, 10 aa, Artificial Sequence
  Description of Artificial Sequence: Synthetic epitope
VMNVIGSERR

SEQ ID NO: 53521 - protein, 10 aa, Artificial Sequence
  Description of Artificial Sequence: Synthetic epitope
VMQFDPADSG

SEQ ID NO: 53522 - protein, 10 aa, Artificial Sequence
  Description of Artificial Sequence: Synthetic epitope
VMQSQSVKPQ

SEQ ID NO: 53523 - protein, 10 aa, Artificial Sequence
  Description of Artificial Sequence: Synthetic epitope
VMSAAQASEA

SEQ ID NO: 53524 - protein, 10 aa, Artificial Sequence
  Description of Artificial Sequence: Synthetic epitope
VMSAQLTMAK

SEQ ID NO: 53525 - protein, 10 aa, Artificial Sequence
  Description of Artificial Sequence: Synthetic epitope
VMSEMAQIAE

SEQ ID NO: 53526 - protein, 10 aa, Artificial Sequence
  Description of Artificial Sequence: Synthetic epitope
VMSLSTILAA

SEQ ID NO: 53527 - protein, 10 aa, Artificial Sequence
  Description of Artificial Sequence: Synthetic epitope
VMSPLQAMSS

SEQ ID NO: 53528 - protein, 10 aa, Artificial Sequence
  Description of Artificial Sequence: Synthetic epitope
VMSVIAQVKE

SEQ ID NO: 53529 - protein, 10 aa, Artificial Sequence
  Description of Artificial Sequence: Synthetic epitope
VMVEPVEAQP

SEQ ID NO: 53530 - protein, 10 aa, Artificial Sequence
  Description of Artificial Sequence: Synthetic epitope
VMVGETEASS

SEQ ID NO: 53531 - protein, 10 aa, Artificial Sequence
  Description of Artificial Sequence: Synthetic epitope
VNAEAKLREA

SEQ ID NO: 53532 - protein, 10 aa, Artificial Sequence
  Description of Artificial Sequence: Synthetic epitope
VNAEETKKAE

SEQ ID NO: 53533 - protein, 10 aa, Artificial Sequence
  Description of Artificial Sequence: Synthetic epitope
VNDKKGTVKH

SEQ ID NO: 53534 - protein, 10 aa, Artificial Sequence
  Description of Artificial Sequence: Synthetic epitope
VNDLSMMKYY

SEQ ID NO: 53535 - protein, 10 aa, Artificial Sequence
  Description of Artificial Sequence: Synthetic epitope
VNDLSYMIPG

SEQ ID NO: 53536 - protein, 10 aa, Artificial Sequence
  Description of Artificial Sequence: Synthetic epitope
VNEASSVSEA

SEQ ID NO: 53537 - protein, 10 aa, Artificial Sequence
  Description of Artificial Sequence: Synthetic epitope
VNEGSLALEE

SEQ ID NO: 53538 - protein, 10 aa, Artificial Sequence
  Description of Artificial Sequence: Synthetic epitope
VNEKKRTPNE

SEQ ID NO: 53539 - protein, 10 aa, Artificial Sequence
  Description of Artificial Sequence: Synthetic epitope
VNENVELEHS

SEQ ID NO: 53540 - protein, 10 aa, Artificial Sequence
  Description of Artificial Sequence: Synthetic epitope
VNFEVKTRAS

SEQ ID NO: 53541 - protein, 10 aa, Artificial Sequence
  Description of Artificial Sequence: Synthetic epitope
VNFYSRIADQ

SEQ ID NO: 53542 - protein, 10 aa, Artificial Sequence
  Description of Artificial Sequence: Synthetic epitope
VNGASVVMVQ

SEQ ID NO: 53543 - protein, 10 aa, Artificial Sequence
  Description of Artificial Sequence: Synthetic epitope
VNHKQYLEAK

SEQ ID NO: 53544 - protein, 10 aa, Artificial Sequence
  Description of Artificial Sequence: Synthetic epitope
VNIFSLVSID

SEQ ID NO: 53545 - protein, 10 aa, Artificial Sequence
  Description of Artificial Sequence: Synthetic epitope
VNIIGVRASS

SEQ ID NO: 53546 - protein, 10 aa, Artificial Sequence
  Description of Artificial Sequence: Synthetic epitope
VNIMKALDGN

SEQ ID NO: 53547 - protein, 10 aa, Artificial Sequence
  Description of Artificial Sequence: Synthetic epitope
VNIRHAKKAQ

SEQ ID NO: 53548 - protein, 10 aa, Artificial Sequence
  Description of Artificial Sequence: Synthetic epitope
VNKAHQANQL

SEQ ID NO: 53549 - protein, 10 aa, Artificial Sequence
  Description of Artificial Sequence: Synthetic epitope
VNKESDMKVP

SEQ ID NO: 53550 - protein, 10 aa, Artificial Sequence
  Description of Artificial Sequence: Synthetic epitope
VNKITHEVDE

SEQ ID NO: 53551 - protein, 10 aa, Artificial Sequence
  Description of Artificial Sequence: Synthetic epitope
VNKSSLSEKG

SEQ ID NO: 53552 - protein, 10 aa, Artificial Sequence
  Description of Artificial Sequence: Synthetic epitope
VNKVVYDDHE

SEQ ID NO: 53553 - protein, 10 aa, Artificial Sequence
  Description of Artificial Sequence: Synthetic epitope
VNLASRPEQG

SEQ ID NO: 53554 - protein, 10 aa, Artificial Sequence
  Description of Artificial Sequence: Synthetic epitope
VNLIKKTVLR

SEQ ID NO: 53555 - protein, 10 aa, Artificial Sequence
  Description of Artificial Sequence: Synthetic epitope
VNLKQVIIHA

SEQ ID NO: 53556 - protein, 10 aa, Artificial Sequence
  Description of Artificial Sequence: Synthetic epitope
VNLQLWMSNK

SEQ ID NO: 53557 - protein, 10 aa, Artificial Sequence
  Description of Artificial Sequence: Synthetic epitope
VNLQRKQAAN

SEQ ID NO: 53558 - protein, 10 aa, Artificial Sequence
  Description of Artificial Sequence: Synthetic epitope
VNLSKKVQES

SEQ ID NO: 53559 - protein, 10 aa, Artificial Sequence
  Description of Artificial Sequence: Synthetic epitope
VNLVVAENEP

SEQ ID NO: 53560 - protein, 10 aa, Artificial Sequence
  Description of Artificial Sequence: Synthetic epitope
VNMAQKAIIR

SEQ ID NO: 53561 - protein, 10 aa, Artificial Sequence
  Description of Artificial Sequence: Synthetic epitope
VNMETPSIAA

SEQ ID NO: 53562 - protein, 10 aa, Artificial Sequence
  Description of Artificial Sequence: Synthetic epitope
VNMNIDTQEQ

SEQ ID NO: 53563 - protein, 10 aa, Artificial Sequence
  Description of Artificial Sequence: Synthetic epitope
VNMQDPEMDM

SEQ ID NO: 53564 - protein, 10 aa, Artificial Sequence
  Description of Artificial Sequence: Synthetic epitope
VNNLVNASDT

SEQ ID NO: 53565 - protein, 10 aa, Artificial Sequence
  Description of Artificial Sequence: Synthetic epitope
VNPAVKNKAE

SEQ ID NO: 53566 - protein, 10 aa, Artificial Sequence
  Description of Artificial Sequence: Synthetic epitope
VNQGAEYSLS

SEQ ID NO: 53567 - protein, 10 aa, Artificial Sequence
  Description of Artificial Sequence: Synthetic epitope
VNQSVGFPPV

SEQ ID NO: 53568 - protein, 10 aa, Artificial Sequence
  Description of Artificial Sequence: Synthetic epitope
VNQVFLRERS

SEQ ID NO: 53569 - protein, 10 aa, Artificial Sequence
  Description of Artificial Sequence: Synthetic epitope
VNRDSDEATE

SEQ ID NO: 53570 - protein, 10 aa, Artificial Sequence
  Description of Artificial Sequence: Synthetic epitope
VNREPISEAL

SEQ ID NO: 53571 - protein, 10 aa, Artificial Sequence
  Description of Artificial Sequence: Synthetic epitope
VNRKAESPPR

SEQ ID NO: 53572 - protein, 10 aa, Artificial Sequence
  Description of Artificial Sequence: Synthetic epitope
VNRPSSATNK

SEQ ID NO: 53573 - protein, 10 aa, Artificial Sequence
  Description of Artificial Sequence: Synthetic epitope
VNSASRVLDA

SEQ ID NO: 53574 - protein, 10 aa, Artificial Sequence
  Description of Artificial Sequence: Synthetic epitope
VNSASSKTDT

SEQ ID NO: 53575 - protein, 10 aa, Artificial Sequence
  Description of Artificial Sequence: Synthetic epitope
VNSATLSRTL

SEQ ID NO: 53576 - protein, 10 aa, Artificial Sequence
  Description of Artificial Sequence: Synthetic epitope
VNSETGYTPE

SEQ ID NO: 53577 - protein, 10 aa, Artificial Sequence
  Description of Artificial Sequence: Synthetic epitope
VNSETLKIGD

SEQ ID NO: 53578 - protein, 10 aa, Artificial Sequence
  Description of Artificial Sequence: Synthetic epitope
VNSIVSSNDE

SEQ ID NO: 53579 - protein, 10 aa, Artificial Sequence
  Description of Artificial Sequence: Synthetic epitope
VNSKLATVEE

SEQ ID NO: 53580 - protein, 10 aa, Artificial Sequence
  Description of Artificial Sequence: Synthetic epitope
VNSQQNLELN

SEQ ID NO: 53581 - protein, 10 aa, Artificial Sequence
  Description of Artificial Sequence: Synthetic epitope
VNTHEKVKTA

SEQ ID NO: 53582 - protein, 10 aa, Artificial Sequence
  Description of Artificial Sequence: Synthetic epitope
VNTMTSLSVK

SEQ ID NO: 53583 - protein, 10 aa, Artificial Sequence
  Description of Artificial Sequence: Synthetic epitope
VNVALQKVQQ

SEQ ID NO: 53584 - protein, 10 aa, Artificial Sequence
  Description of Artificial Sequence: Synthetic epitope
VNVANNFSST

SEQ ID NO: 53585 - protein, 10 aa, Artificial Sequence
  Description of Artificial Sequence: Synthetic epitope
VNVEHKTTSK

SEQ ID NO: 53586 - protein, 10 aa, Artificial Sequence
  Description of Artificial Sequence: Synthetic epitope
VNVFRLEMEG

SEQ ID NO: 53587 - protein, 10 aa, Artificial Sequence
  Description of Artificial Sequence: Synthetic epitope
VNVKSSQFKL

SEQ ID NO: 53588 - protein, 10 aa, Artificial Sequence
  Description of Artificial Sequence: Synthetic epitope
VNVKTVRGSL

SEQ ID NO: 53589 - protein, 10 aa, Artificial Sequence
  Description of Artificial Sequence: Synthetic epitope
VNVLSDLVYT

SEQ ID NO: 53590 - protein, 10 aa, Artificial Sequence
  Description of Artificial Sequence: Synthetic epitope
VNVQVIYLYE

SEQ ID NO: 53591 - protein, 10 aa, Artificial Sequence
  Description of Artificial Sequence: Synthetic epitope
VNVSMGSTFD

SEQ ID NO: 53592 - protein, 10 aa, Artificial Sequence
  Description of Artificial Sequence: Synthetic epitope
VNVSVKQQTS

SEQ ID NO: 53593 - protein, 10 aa, Artificial Sequence
  Description of Artificial Sequence: Synthetic epitope
VNVTEVVKSS

SEQ ID NO: 53594 - protein, 10 aa, Artificial Sequence
  Description of Artificial Sequence: Synthetic epitope
VNVTGAISIA

SEQ ID NO: 53595 - protein, 10 aa, Artificial Sequence
  Description of Artificial Sequence: Synthetic epitope
VNVTMKDNKI

SEQ ID NO: 53596 - protein, 10 aa, Artificial Sequence
  Description of Artificial Sequence: Synthetic epitope
VPAAMEFIAA

SEQ ID NO: 53597 - protein, 10 aa, Artificial Sequence
  Description of Artificial Sequence: Synthetic epitope
VPASALQQGN

SEQ ID NO: 53598 - protein, 10 aa, Artificial Sequence
  Description of Artificial Sequence: Synthetic epitope
VPASQSQVHL

SEQ ID NO: 53599 - protein, 10 aa, Artificial Sequence
  Description of Artificial Sequence: Synthetic epitope
VPATTKQIEN

SEQ ID NO: 53600 - protein, 10 aa, Artificial Sequence
  Description of Artificial Sequence: Synthetic epitope
VPAYTEQSQI

SEQ ID NO: 53601 - protein, 10 aa, Artificial Sequence
  Description of Artificial Sequence: Synthetic epitope
VPDVNTEPSQ

SEQ ID NO: 53602 - protein, 10 aa, Artificial Sequence
  Description of Artificial Sequence: Synthetic epitope
VPEAVALERR

SEQ ID NO: 53603 - protein, 10 aa, Artificial Sequence
  Description of Artificial Sequence: Synthetic epitope
VPEEVEAHQS

SEQ ID NO: 53604 - protein, 10 aa, Artificial Sequence
  Description of Artificial Sequence: Synthetic epitope
VPELSSEVQS

SEQ ID NO: 53605 - protein, 10 aa, Artificial Sequence
  Description of Artificial Sequence: Synthetic epitope
VPFLSSARRS

SEQ ID NO: 53606 - protein, 10 aa, Artificial Sequence
  Description of Artificial Sequence: Synthetic epitope
VPFQVAQKEI

SEQ ID NO: 53607 - protein, 10 aa, Artificial Sequence
  Description of Artificial Sequence: Synthetic epitope
VPGDAARVRD

SEQ ID NO: 53608 - protein, 10 aa, Artificial Sequence
  Description of Artificial Sequence: Synthetic epitope
VPGQAQVQEK

SEQ ID NO: 53609 - protein, 10 aa, Artificial Sequence
  Description of Artificial Sequence: Synthetic epitope
VPIASTSDKV

SEQ ID NO: 53610 - protein, 10 aa, Artificial Sequence
  Description of Artificial Sequence: Synthetic epitope
VPILSKLSQE

SEQ ID NO: 53611 - protein, 10 aa, Artificial Sequence
  Description of Artificial Sequence: Synthetic epitope
VPKEQMSLVH

SEQ ID NO: 53612 - protein, 10 aa, Artificial Sequence
  Description of Artificial Sequence: Synthetic epitope
VPKFVSTTLR

SEQ ID NO: 53613 - protein, 10 aa, Artificial Sequence
  Description of Artificial Sequence: Synthetic epitope
VPKKAGLEDA

SEQ ID NO: 53614 - protein, 10 aa, Artificial Sequence
  Description of Artificial Sequence: Synthetic epitope
VPKRRQAARE

SEQ ID NO: 53615 - protein, 10 aa, Artificial Sequence
  Description of Artificial Sequence: Synthetic epitope
VPKVSIVASP

SEQ ID NO: 53616 - protein, 10 aa, Artificial Sequence
  Description of Artificial Sequence: Synthetic epitope
VPLLKLARDY

SEQ ID NO: 53617 - protein, 10 aa, Artificial Sequence
  Description of Artificial Sequence: Synthetic epitope
VPLSVQLKPE

SEQ ID NO: 53618 - protein, 10 aa, Artificial Sequence
  Description of Artificial Sequence: Synthetic epitope
VPLTVRVSPE

SEQ ID NO: 53619 - protein, 10 aa, Artificial Sequence
  Description of Artificial Sequence: Synthetic epitope
VPLYSLLEQT

SEQ ID NO: 53620 - protein, 10 aa, Artificial Sequence
  Description of Artificial Sequence: Synthetic epitope
VPMILQQRAE

SEQ ID NO: 53621 - protein, 10 aa, Artificial Sequence
  Description of Artificial Sequence: Synthetic epitope
VPNELNSNLK

SEQ ID NO: 53622 - protein, 10 aa, Artificial Sequence
  Description of Artificial Sequence: Synthetic epitope
VPNKAFELKN

SEQ ID NO: 53623 - protein, 10 aa, Artificial Sequence
  Description of Artificial Sequence: Synthetic epitope
VPNNQGIAQE

SEQ ID NO: 53624 - protein, 10 aa, Artificial Sequence
  Description of Artificial Sequence: Synthetic epitope
VPPASRSRSV

SEQ ID NO: 53625 - protein, 10 aa, Artificial Sequence
  Description of Artificial Sequence: Synthetic epitope
VPQFRTSKEG

SEQ ID NO: 53626 - protein, 10 aa, Artificial Sequence
  Description of Artificial Sequence: Synthetic epitope
VPQQTSLVQA

SEQ ID NO: 53627 - protein, 10 aa, Artificial Sequence
  Description of Artificial Sequence: Synthetic epitope
VPQTVLNEAQ

SEQ ID NO: 53628 - protein, 10 aa, Artificial Sequence
  Description of Artificial Sequence: Synthetic epitope
VPQVKQQTDK

SEQ ID NO: 53629 - protein, 10 aa, Artificial Sequence
  Description of Artificial Sequence: Synthetic epitope
VPREKAFQKS

SEQ ID NO: 53630 - protein, 10 aa, Artificial Sequence
  Description of Artificial Sequence: Synthetic epitope
VPRLTSAEDR

SEQ ID NO: 53631 - protein, 10 aa, Artificial Sequence
  Description of Artificial Sequence: Synthetic epitope
VPRSIAANMT

SEQ ID NO: 53632 - protein, 10 aa, Artificial Sequence
  Description of Artificial Sequence: Synthetic epitope
VPRYKHVEQN

SEQ ID NO: 53633 - protein, 10 aa, Artificial Sequence
  Description of Artificial Sequence: Synthetic epitope
VPSALMKQPP

SEQ ID NO: 53634 - protein, 10 aa, Artificial Sequence
  Description of Artificial Sequence: Synthetic epitope
VPSQQSQPQS

SEQ ID NO: 53635 - protein, 10 aa, Artificial Sequence
  Description of Artificial Sequence: Synthetic epitope
VPSSLSQSAI

SEQ ID NO: 53636 - protein, 10 aa, Artificial Sequence
  Description of Artificial Sequence: Synthetic epitope
VPTDLAVEEA

SEQ ID NO: 53637 - protein, 10 aa, Artificial Sequence
  Description of Artificial Sequence: Synthetic epitope
VPTDTKESSE

SEQ ID NO: 53638 - protein, 10 aa, Artificial Sequence
  Description of Artificial Sequence: Synthetic epitope
VPTLQKGHQN

SEQ ID NO: 53639 - protein, 10 aa, Artificial Sequence
  Description of Artificial Sequence: Synthetic epitope
VPTVSLKVSE

SEQ ID NO: 53640 - protein, 10 aa, Artificial Sequence
  Description of Artificial Sequence: Synthetic epitope
VPVKAQTTAA

SEQ ID NO: 53641 - protein, 10 aa, Artificial Sequence
  Description of Artificial Sequence: Synthetic epitope
VPVRIALGAS

SEQ ID NO: 53642 - protein, 10 aa, Artificial Sequence
  Description of Artificial Sequence: Synthetic epitope
VPVTDMAPLN

SEQ ID NO: 53643 - protein, 10 aa, Artificial Sequence
  Description of Artificial Sequence: Synthetic epitope
VPVVEAVPEE

SEQ ID NO: 53644 - protein, 10 aa, Artificial Sequence
  Description of Artificial Sequence: Synthetic epitope
VPYFKYIDEE

SEQ ID NO: 53645 - protein, 10 aa, Artificial Sequence
  Description of Artificial Sequence: Synthetic epitope
VPYTGAVKVG

SEQ ID NO: 53646 - protein, 10 aa, Artificial Sequence
  Description of Artificial Sequence: Synthetic epitope
VQAEEAASMS

SEQ ID NO: 53647 - protein, 10 aa, Artificial Sequence
  Description of Artificial Sequence: Synthetic epitope
VQAITMKINF

SEQ ID NO: 53648 - protein, 10 aa, Artificial Sequence
  Description of Artificial Sequence: Synthetic epitope
VQALELADEA

SEQ ID NO: 53649 - protein, 10 aa, Artificial Sequence
  Description of Artificial Sequence: Synthetic epitope
VQALLELPTT

SEQ ID NO: 53650 - protein, 10 aa, Artificial Sequence
  Description of Artificial Sequence: Synthetic epitope
VQAMQSFNST

SEQ ID NO: 53651 - protein, 10 aa, Artificial Sequence
  Description of Artificial Sequence: Synthetic epitope
VQANKLLQNQ

SEQ ID NO: 53652 - protein, 10 aa, Artificial Sequence
  Description of Artificial Sequence: Synthetic epitope
VQAQHSATKV

SEQ ID NO: 53653 - protein, 10 aa, Artificial Sequence
  Description of Artificial Sequence: Synthetic epitope
VQAQVQAQAV

SEQ ID NO: 53654 - protein, 10 aa, Artificial Sequence
  Description of Artificial Sequence: Synthetic epitope
VQATMVRDRQ

SEQ ID NO: 53655 - protein, 10 aa, Artificial Sequence
  Description of Artificial Sequence: Synthetic epitope
VQATTDTGAE

SEQ ID NO: 53656 - protein, 10 aa, Artificial Sequence
  Description of Artificial Sequence: Synthetic epitope
VQAVQSLTQE

SEQ ID NO: 53657 - protein, 10 aa, Artificial Sequence
  Description of Artificial Sequence: Synthetic epitope
VQAVQSLTQE

SEQ ID NO: 53658 - protein, 10 aa, Artificial Sequence
  Description of Artificial Sequence: Synthetic epitope
VQAVSSLSGQ

SEQ ID NO: 53659 - protein, 10 aa, Artificial Sequence
  Description of Artificial Sequence: Synthetic epitope
VQDAETTSLE

SEQ ID NO: 53660 - protein, 10 aa, Artificial Sequence
  Description of Artificial Sequence: Synthetic epitope
VQDIESADVS

SEQ ID NO: 53661 - protein, 10 aa, Artificial Sequence
  Description of Artificial Sequence: Synthetic epitope
VQEAQKSQTE

SEQ ID NO: 53662 - protein, 10 aa, Artificial Sequence
  Description of Artificial Sequence: Synthetic epitope
VQEGALTSPV

SEQ ID NO: 53663 - protein, 10 aa, Artificial Sequence
  Description of Artificial Sequence: Synthetic epitope
VQEKVKRASV

SEQ ID NO: 53664 - protein, 10 aa, Artificial Sequence
  Description of Artificial Sequence: Synthetic epitope
VQEMEVVKQG

SEQ ID NO: 53665 - protein, 10 aa, Artificial Sequence
  Description of Artificial Sequence: Synthetic epitope
VQENMIQEKQ

SEQ ID NO: 53666 - protein, 10 aa, Artificial Sequence
  Description of Artificial Sequence: Synthetic epitope
VQESAAQLSM

SEQ ID NO: 53667 - protein, 10 aa, Artificial Sequence
  Description of Artificial Sequence: Synthetic epitope
VQESLERKFG

SEQ ID NO: 53668 - protein, 10 aa, Artificial Sequence
  Description of Artificial Sequence: Synthetic epitope
VQESLERKFG

SEQ ID NO: 53669 - protein, 10 aa, Artificial Sequence
  Description of Artificial Sequence: Synthetic epitope
VQETEKAEEA

SEQ ID NO: 53670 - protein, 10 aa, Artificial Sequence
  Description of Artificial Sequence: Synthetic epitope
VQFNEVLAAS

SEQ ID NO: 53671 - protein, 10 aa, Artificial Sequence
  Description of Artificial Sequence: Synthetic epitope
VQGDQDKTEQ

SEQ ID NO: 53672 - protein, 10 aa, Artificial Sequence
  Description of Artificial Sequence: Synthetic epitope
VQGDSQSQGD

SEQ ID NO: 53673 - protein, 10 aa, Artificial Sequence
  Description of Artificial Sequence: Synthetic epitope
VQGIRAMEVD

SEQ ID NO: 53674 - protein, 10 aa, Artificial Sequence
  Description of Artificial Sequence: Synthetic epitope
VQGNAKFVSP

SEQ ID NO: 53675 - protein, 10 aa, Artificial Sequence
  Description of Artificial Sequence: Synthetic epitope
VQGTLGVSTS

SEQ ID NO: 53676 - protein, 10 aa, Artificial Sequence
  Description of Artificial Sequence: Synthetic epitope
VQGTQTSQLS

SEQ ID NO: 53677 - protein, 10 aa, Artificial Sequence
  Description of Artificial Sequence: Synthetic epitope
VQHEQILPRV

SEQ ID NO: 53678 - protein, 10 aa, Artificial Sequence
  Description of Artificial Sequence: Synthetic epitope
VQHNEHEDQH

SEQ ID NO: 53679 - protein, 10 aa, Artificial Sequence
  Description of Artificial Sequence: Synthetic epitope
VQIAVANAQE

SEQ ID NO: 53680 - protein, 10 aa, Artificial Sequence
  Description of Artificial Sequence: Synthetic epitope
VQIKAELTPK

SEQ ID NO: 53681 - protein, 10 aa, Artificial Sequence
  Description of Artificial Sequence: Synthetic epitope
VQIKGSVEDI

SEQ ID NO: 53682 - protein, 10 aa, Artificial Sequence
  Description of Artificial Sequence: Synthetic epitope
VQIKQWYETN

SEQ ID NO: 53683 - protein, 10 aa, Artificial Sequence
  Description of Artificial Sequence: Synthetic epitope
VQIQEEFEES

SEQ ID NO: 53684 - protein, 10 aa, Artificial Sequence
  Description of Artificial Sequence: Synthetic epitope
VQIRRISSLE

SEQ ID NO: 53685 - protein, 10 aa, Artificial Sequence
  Description of Artificial Sequence: Synthetic epitope
VQISQSPTAM

SEQ ID NO: 53686 - protein, 10 aa, Artificial Sequence
  Description of Artificial Sequence: Synthetic epitope
VQIVSIKDYF

SEQ ID NO: 53687 - protein, 10 aa, Artificial Sequence
  Description of Artificial Sequence: Synthetic epitope
VQKAKLVTEL

SEQ ID NO: 53688 - protein, 10 aa, Artificial Sequence
  Description of Artificial Sequence: Synthetic epitope
VQKAVTRTKR

SEQ ID NO: 53689 - protein, 10 aa, Artificial Sequence
  Description of Artificial Sequence: Synthetic epitope
VQKGLVKTKK

SEQ ID NO: 53690 - protein, 10 aa, Artificial Sequence
  Description of Artificial Sequence: Synthetic epitope
VQKKEWKGQR

SEQ ID NO: 53691 - protein, 10 aa, Artificial Sequence
  Description of Artificial Sequence: Synthetic epitope
VQKMPGQLPI

SEQ ID NO: 53692 - protein, 10 aa, Artificial Sequence
  Description of Artificial Sequence: Synthetic epitope
VQKTSEQATV

SEQ ID NO: 53693 - protein, 10 aa, Artificial Sequence
  Description of Artificial Sequence: Synthetic epitope
VQLDSAISME

SEQ ID NO: 53694 - protein, 10 aa, Artificial Sequence
  Description of Artificial Sequence: Synthetic epitope
VQLGFISEAD

SEQ ID NO: 53695 - protein, 10 aa, Artificial Sequence
  Description of Artificial Sequence: Synthetic epitope
VQLGQSQHKQ

SEQ ID NO: 53696 - protein, 10 aa, Artificial Sequence
  Description of Artificial Sequence: Synthetic epitope
VQLQNAIQAG

SEQ ID NO: 53697 - protein, 10 aa, Artificial Sequence
  Description of Artificial Sequence: Synthetic epitope
VQLQNAIQAG

SEQ ID NO: 53698 - protein, 10 aa, Artificial Sequence
  Description of Artificial Sequence: Synthetic epitope
VQLQNSISLS

SEQ ID NO: 53699 - protein, 10 aa, Artificial Sequence
  Description of Artificial Sequence: Synthetic epitope
VQLQRAMAAE

SEQ ID NO: 53700 - protein, 10 aa, Artificial Sequence
  Description of Artificial Sequence: Synthetic epitope
VQLQTSTAEE

SEQ ID NO: 53701 - protein, 10 aa, Artificial Sequence
  Description of Artificial Sequence: Synthetic epitope
VQLRNMVQQI

SEQ ID NO: 53702 - protein, 10 aa, Artificial Sequence
  Description of Artificial Sequence: Synthetic epitope
VQLSSKEKIW

SEQ ID NO: 53703 - protein, 10 aa, Artificial Sequence
  Description of Artificial Sequence: Synthetic epitope
VQLVEMLDMS

SEQ ID NO: 53704 - protein, 10 aa, Artificial Sequence
  Description of Artificial Sequence: Synthetic epitope
VQLVHSLAAT

SEQ ID NO: 53705 - protein, 10 aa, Artificial Sequence
  Description of Artificial Sequence: Synthetic epitope
VQMDSTLQGD

SEQ ID NO: 53706 - protein, 10 aa, Artificial Sequence
  Description of Artificial Sequence: Synthetic epitope
VQMKVLSEDK

SEQ ID NO: 53707 - protein, 10 aa, Artificial Sequence
  Description of Artificial Sequence: Synthetic epitope
VQMSKFEDFR

SEQ ID NO: 53708 - protein, 10 aa, Artificial Sequence
  Description of Artificial Sequence: Synthetic epitope
VQMYNDPKTS

SEQ ID NO: 53709 - protein, 10 aa, Artificial Sequence
  Description of Artificial Sequence: Synthetic epitope
VQNIIQTAVD

SEQ ID NO: 53710 - protein, 10 aa, Artificial Sequence
  Description of Artificial Sequence: Synthetic epitope
VQNLVNKSKK

SEQ ID NO: 53711 - protein, 10 aa, Artificial Sequence
  Description of Artificial Sequence: Synthetic epitope
VQPAKRTDYQ

SEQ ID NO: 53712 - protein, 10 aa, Artificial Sequence
  Description of Artificial Sequence: Synthetic epitope
VQPKNNDKSE

SEQ ID NO: 53713 - protein, 10 aa, Artificial Sequence
  Description of Artificial Sequence: Synthetic epitope
VQPQKVVDAA

SEQ ID NO: 53714 - protein, 10 aa, Artificial Sequence
  Description of Artificial Sequence: Synthetic epitope
VQPQQSSVTT

SEQ ID NO: 53715 - protein, 10 aa, Artificial Sequence
  Description of Artificial Sequence: Synthetic epitope
VQQSPQQVSA

SEQ ID NO: 53716 - protein, 10 aa, Artificial Sequence
  Description of Artificial Sequence: Synthetic epitope
VQQSQPSQSS

SEQ ID NO: 53717 - protein, 10 aa, Artificial Sequence
  Description of Artificial Sequence: Synthetic epitope
VQRAQIRASR

SEQ ID NO: 53718 - protein, 10 aa, Artificial Sequence
  Description of Artificial Sequence: Synthetic epitope
VQRAQSASKS

SEQ ID NO: 53719 - protein, 10 aa, Artificial Sequence
  Description of Artificial Sequence: Synthetic epitope
VQRISNVKVN

SEQ ID NO: 53720 - protein, 10 aa, Artificial Sequence
  Description of Artificial Sequence: Synthetic epitope
VQRKDIQIPM

SEQ ID NO: 53721 - protein, 10 aa, Artificial Sequence
  Description of Artificial Sequence: Synthetic epitope
VQRLIRSQMQ

SEQ ID NO: 53722 - protein, 10 aa, Artificial Sequence
  Description of Artificial Sequence: Synthetic epitope
VQRLLMLKQQ

SEQ ID NO: 53723 - protein, 10 aa, Artificial Sequence
  Description of Artificial Sequence: Synthetic epitope
VQRNMFEFKH

SEQ ID NO: 53724 - protein, 10 aa, Artificial Sequence
  Description of Artificial Sequence: Synthetic epitope
VQRPLLFASR

SEQ ID NO: 53725 - protein, 10 aa, Artificial Sequence
  Description of Artificial Sequence: Synthetic epitope
VQRTRQLVTS

SEQ ID NO: 53726 - protein, 10 aa, Artificial Sequence
  Description of Artificial Sequence: Synthetic epitope
VQSAISTQPE

SEQ ID NO: 53727 - protein, 10 aa, Artificial Sequence
  Description of Artificial Sequence: Synthetic epitope
VQSAISTQPE

SEQ ID NO: 53728 - protein, 10 aa, Artificial Sequence
  Description of Artificial Sequence: Synthetic epitope
VQSASSAIIK

SEQ ID NO: 53729 - protein, 10 aa, Artificial Sequence
  Description of Artificial Sequence: Synthetic epitope
VQSDSLPSTS

SEQ ID NO: 53730 - protein, 10 aa, Artificial Sequence
  Description of Artificial Sequence: Synthetic epitope
VQSEEMLEDK

SEQ ID NO: 53731 - protein, 10 aa, Artificial Sequence
  Description of Artificial Sequence: Synthetic epitope
VQSPSSKSND

SEQ ID NO: 53732 - protein, 10 aa, Artificial Sequence
  Description of Artificial Sequence: Synthetic epitope
VQSRVNKKSP

SEQ ID NO: 53733 - protein, 10 aa, Artificial Sequence
  Description of Artificial Sequence: Synthetic epitope
VQSSFPVKQA

SEQ ID NO: 53734 - protein, 10 aa, Artificial Sequence
  Description of Artificial Sequence: Synthetic epitope
VQSSTLVSSL

SEQ ID NO: 53735 - protein, 10 aa, Artificial Sequence
  Description of Artificial Sequence: Synthetic epitope
VQSTLISELK

SEQ ID NO: 53736 - protein, 10 aa, Artificial Sequence
  Description of Artificial Sequence: Synthetic epitope
VQSTSKSAQT

SEQ ID NO: 53737 - protein, 10 aa, Artificial Sequence
  Description of Artificial Sequence: Synthetic epitope
VQTDWATSPI

SEQ ID NO: 53738 - protein, 10 aa, Artificial Sequence
  Description of Artificial Sequence: Synthetic epitope
VQTILNTRNK

SEQ ID NO: 53739 - protein, 10 aa, Artificial Sequence
  Description of Artificial Sequence: Synthetic epitope
VQTLLRSELS

SEQ ID NO: 53740 - protein, 10 aa, Artificial Sequence
  Description of Artificial Sequence: Synthetic epitope
VQTNMYAKKF

SEQ ID NO: 53741 - protein, 10 aa, Artificial Sequence
  Description of Artificial Sequence: Synthetic epitope
VQTQPAIKKD

SEQ ID NO: 53742 - protein, 10 aa, Artificial Sequence
  Description of Artificial Sequence: Synthetic epitope
VQTQVRLAKK

SEQ ID NO: 53743 - protein, 10 aa, Artificial Sequence
  Description of Artificial Sequence: Synthetic epitope
VQTRSISNKE

SEQ ID NO: 53744 - protein, 10 aa, Artificial Sequence
  Description of Artificial Sequence: Synthetic epitope
VQTSKTLASS

SEQ ID NO: 53745 - protein, 10 aa, Artificial Sequence
  Description of Artificial Sequence: Synthetic epitope
VQVKSERSRN

SEQ ID NO: 53746 - protein, 10 aa, Artificial Sequence
  Description of Artificial Sequence: Synthetic epitope
VQVLEEQGQQ

SEQ ID NO: 53747 - protein, 10 aa, Artificial Sequence
  Description of Artificial Sequence: Synthetic epitope
VQVLEEQGQQ

SEQ ID NO: 53748 - protein, 10 aa, Artificial Sequence
  Description of Artificial Sequence: Synthetic epitope
VQVPNMQDKT

SEQ ID NO: 53749 - protein, 10 aa, Artificial Sequence
  Description of Artificial Sequence: Synthetic epitope
VQVTAKTMAQ

SEQ ID NO: 53750 - protein, 10 aa, Artificial Sequence
  Description of Artificial Sequence: Synthetic epitope
VQVVAAVAAP

SEQ ID NO: 53751 - protein, 10 aa, Artificial Sequence
  Description of Artificial Sequence: Synthetic epitope
VQWAELAGHD

SEQ ID NO: 53752 - protein, 10 aa, Artificial Sequence
  Description of Artificial Sequence: Synthetic epitope
VQWEQQEARS

SEQ ID NO: 53753 - protein, 10 aa, Artificial Sequence
  Description of Artificial Sequence: Synthetic epitope
VQWLKHSRKE

SEQ ID NO: 53754 - protein, 10 aa, Artificial Sequence
  Description of Artificial Sequence: Synthetic epitope
VQYDNHYTNT

SEQ ID NO: 53755 - protein, 10 aa, Artificial Sequence
  Description of Artificial Sequence: Synthetic epitope
VQYEKKIKRK

SEQ ID NO: 53756 - protein, 10 aa, Artificial Sequence
  Description of Artificial Sequence: Synthetic epitope
VRAEERAPSR

SEQ ID NO: 53757 - protein, 10 aa, Artificial Sequence
  Description of Artificial Sequence: Synthetic epitope
VRAELSLKSV

SEQ ID NO: 53758 - protein, 10 aa, Artificial Sequence
  Description of Artificial Sequence: Synthetic epitope
VRAFVASRGT

SEQ ID NO: 53759 - protein, 10 aa, Artificial Sequence
  Description of Artificial Sequence: Synthetic epitope
VRAKNDQRFE

SEQ ID NO: 53760 - protein, 10 aa, Artificial Sequence
  Description of Artificial Sequence: Synthetic epitope
VRALQATEEK

SEQ ID NO: 53761 - protein, 10 aa, Artificial Sequence
  Description of Artificial Sequence: Synthetic epitope
VRDGVAPNGS

SEQ ID NO: 53762 - protein, 10 aa, Artificial Sequence
  Description of Artificial Sequence: Synthetic epitope
VRDKISQLFQ

SEQ ID NO: 53763 - protein, 10 aa, Artificial Sequence
  Description of Artificial Sequence: Synthetic epitope
VRDPHPKATS

SEQ ID NO: 53764 - protein, 10 aa, Artificial Sequence
  Description of Artificial Sequence: Synthetic epitope
VREALISDET

SEQ ID NO: 53765 - protein, 10 aa, Artificial Sequence
  Description of Artificial Sequence: Synthetic epitope
VRELVSLKQE

SEQ ID NO: 53766 - protein, 10 aa, Artificial Sequence
  Description of Artificial Sequence: Synthetic epitope
VRERRVTPDV

SEQ ID NO: 53767 - protein, 10 aa, Artificial Sequence
  Description of Artificial Sequence: Synthetic epitope
VRESQITEVK

SEQ ID NO: 53768 - protein, 10 aa, Artificial Sequence
  Description of Artificial Sequence: Synthetic epitope
VREVRVAVAT

SEQ ID NO: 53769 - protein, 10 aa, Artificial Sequence
  Description of Artificial Sequence: Synthetic epitope
VRFLLARHSG

SEQ ID NO: 53770 - protein, 10 aa, Artificial Sequence
  Description of Artificial Sequence: Synthetic epitope
VRGKTASRQS

SEQ ID NO: 53771 - protein, 10 aa, Artificial Sequence
  Description of Artificial Sequence: Synthetic epitope
VRHALSVTSE

SEQ ID NO: 53772 - protein, 10 aa, Artificial Sequence
  Description of Artificial Sequence: Synthetic epitope
VRHLMKSEAP

SEQ ID NO: 53773 - protein, 10 aa, Artificial Sequence
  Description of Artificial Sequence: Synthetic epitope
VRHTSLVTQL

SEQ ID NO: 53774 - protein, 10 aa, Artificial Sequence
  Description of Artificial Sequence: Synthetic epitope
VRILSSLSLR

SEQ ID NO: 53775 - protein, 10 aa, Artificial Sequence
  Description of Artificial Sequence: Synthetic epitope
VRIREMSSTL

SEQ ID NO: 53776 - protein, 10 aa, Artificial Sequence
  Description of Artificial Sequence: Synthetic epitope
VRISKLISNT

SEQ ID NO: 53777 - protein, 10 aa, Artificial Sequence
  Description of Artificial Sequence: Synthetic epitope
VRITEAVATA

SEQ ID NO: 53778 - protein, 10 aa, Artificial Sequence
  Description of Artificial Sequence: Synthetic epitope
VRKAEVAGSK

SEQ ID NO: 53779 - protein, 10 aa, Artificial Sequence
  Description of Artificial Sequence: Synthetic epitope
VRKHQFLAEI

SEQ ID NO: 53780 - protein, 10 aa, Artificial Sequence
  Description of Artificial Sequence: Synthetic epitope
VRKMKNIQSQ

SEQ ID NO: 53781 - protein, 10 aa, Artificial Sequence
  Description of Artificial Sequence: Synthetic epitope
VRLEAAQGPQ

SEQ ID NO: 53782 - protein, 10 aa, Artificial Sequence
  Description of Artificial Sequence: Synthetic epitope
VRLLQLRTAE

SEQ ID NO: 53783 - protein, 10 aa, Artificial Sequence
  Description of Artificial Sequence: Synthetic epitope
VRLRSLEAKG

SEQ ID NO: 53784 - protein, 10 aa, Artificial Sequence
  Description of Artificial Sequence: Synthetic epitope
VRLVIDEMGF

SEQ ID NO: 53785 - protein, 10 aa, Artificial Sequence
  Description of Artificial Sequence: Synthetic epitope
VRMLAELDML

SEQ ID NO: 53786 - protein, 10 aa, Artificial Sequence
  Description of Artificial Sequence: Synthetic epitope
VRNEEASETV

SEQ ID NO: 53787 - protein, 10 aa, Artificial Sequence
  Description of Artificial Sequence: Synthetic epitope
VRNGAKLSSL

SEQ ID NO: 53788 - protein, 10 aa, Artificial Sequence
  Description of Artificial Sequence: Synthetic epitope
VRNLSMIVEE

SEQ ID NO: 53789 - protein, 10 aa, Artificial Sequence
  Description of Artificial Sequence: Synthetic epitope
VRNSMNKTGF

SEQ ID NO: 53790 - protein, 10 aa, Artificial Sequence
  Description of Artificial Sequence: Synthetic epitope
VRNSRMIDIQ

SEQ ID NO: 53791 - protein, 10 aa, Artificial Sequence
  Description of Artificial Sequence: Synthetic epitope
VRPLKLSKSK

SEQ ID NO: 53792 - protein, 10 aa, Artificial Sequence
  Description of Artificial Sequence: Synthetic epitope
VRPQIRLERE

SEQ ID NO: 53793 - protein, 10 aa, Artificial Sequence
  Description of Artificial Sequence: Synthetic epitope
VRRISPITRA

SEQ ID NO: 53794 - protein, 10 aa, Artificial Sequence
  Description of Artificial Sequence: Synthetic epitope
VRRSVRVKTK

SEQ ID NO: 53795 - protein, 10 aa, Artificial Sequence
  Description of Artificial Sequence: Synthetic epitope
VRSARLEEHR

SEQ ID NO: 53796 - protein, 10 aa, Artificial Sequence
  Description of Artificial Sequence: Synthetic epitope
VRSGADSSLK

SEQ ID NO: 53797 - protein, 10 aa, Artificial Sequence
  Description of Artificial Sequence: Synthetic epitope
VRSLKASERE

SEQ ID NO: 53798 - protein, 10 aa, Artificial Sequence
  Description of Artificial Sequence: Synthetic epitope
VRSMKSELSY

SEQ ID NO: 53799 - protein, 10 aa, Artificial Sequence
  Description of Artificial Sequence: Synthetic epitope
VRSRLLRDPD

SEQ ID NO: 53800 - protein, 10 aa, Artificial Sequence
  Description of Artificial Sequence: Synthetic epitope
VRSRVDSKTL

SEQ ID NO: 53801 - protein, 10 aa, Artificial Sequence
  Description of Artificial Sequence: Synthetic epitope
VRSSTDSNNE

SEQ ID NO: 53802 - protein, 10 aa, Artificial Sequence
  Description of Artificial Sequence: Synthetic epitope
VRSTTRQMRS

SEQ ID NO: 53803 - protein, 10 aa, Artificial Sequence
  Description of Artificial Sequence: Synthetic epitope
VRTKADSVPG

SEQ ID NO: 53804 - protein, 10 aa, Artificial Sequence
  Description of Artificial Sequence: Synthetic epitope
VRTKQEAEKQ

SEQ ID NO: 53805 - protein, 10 aa, Artificial Sequence
  Description of Artificial Sequence: Synthetic epitope
VRTSRITIGG

SEQ ID NO: 53806 - protein, 10 aa, Artificial Sequence
  Description of Artificial Sequence: Synthetic epitope
VRTTSMTRQQ

SEQ ID NO: 53807 - protein, 10 aa, Artificial Sequence
  Description of Artificial Sequence: Synthetic epitope
VRVESEKGAV

SEQ ID NO: 53808 - protein, 10 aa, Artificial Sequence
  Description of Artificial Sequence: Synthetic epitope
VRVLLMLRKM

SEQ ID NO: 53809 - protein, 10 aa, Artificial Sequence
  Description of Artificial Sequence: Synthetic epitope
VRVVRALDAV

SEQ ID NO: 53810 - protein, 10 aa, Artificial Sequence
  Description of Artificial Sequence: Synthetic epitope
VSAATLLPEQ

SEQ ID NO: 53811 - protein, 10 aa, Artificial Sequence
  Description of Artificial Sequence: Synthetic epitope
VSARRPELNQ

SEQ ID NO: 53812 - protein, 10 aa, Artificial Sequence
  Description of Artificial Sequence: Synthetic epitope
VSASDADQQA

SEQ ID NO: 53813 - protein, 10 aa, Artificial Sequence
  Description of Artificial Sequence: Synthetic epitope
VSASDILQES

SEQ ID NO: 53814 - protein, 10 aa, Artificial Sequence
  Description of Artificial Sequence: Synthetic epitope
VSASESRKEL

SEQ ID NO: 53815 - protein, 10 aa, Artificial Sequence
  Description of Artificial Sequence: Synthetic epitope
VSAVSQLTDS

SEQ ID NO: 53816 - protein, 10 aa, Artificial Sequence
  Description of Artificial Sequence: Synthetic epitope
VSDKSGKREK

SEQ ID NO: 53817 - protein, 10 aa, Artificial Sequence
  Description of Artificial Sequence: Synthetic epitope
VSDMVEDKLD

SEQ ID NO: 53818 - protein, 10 aa, Artificial Sequence
  Description of Artificial Sequence: Synthetic epitope
VSDQVQIKVT

SEQ ID NO: 53819 - protein, 10 aa, Artificial Sequence
  Description of Artificial Sequence: Synthetic epitope
VSDSKEKKNA

SEQ ID NO: 53820 - protein, 10 aa, Artificial Sequence
  Description of Artificial Sequence: Synthetic epitope
VSDTVAVKET

SEQ ID NO: 53821 - protein, 10 aa, Artificial Sequence
  Description of Artificial Sequence: Synthetic epitope
VSEAEKRTGR

SEQ ID NO: 53822 - protein, 10 aa, Artificial Sequence
  Description of Artificial Sequence: Synthetic epitope
VSEASKESSV

SEQ ID NO: 53823 - protein, 10 aa, Artificial Sequence
  Description of Artificial Sequence: Synthetic epitope
VSEEGPAARA

SEQ ID NO: 53824 - protein, 10 aa, Artificial Sequence
  Description of Artificial Sequence: Synthetic epitope
VSEEQQTSDN

SEQ ID NO: 53825 - protein, 10 aa, Artificial Sequence
  Description of Artificial Sequence: Synthetic epitope
VSEIVSSQMN

SEQ ID NO: 53826 - protein, 10 aa, Artificial Sequence
  Description of Artificial Sequence: Synthetic epitope
VSELAESDSD

SEQ ID NO: 53827 - protein, 10 aa, Artificial Sequence
  Description of Artificial Sequence: Synthetic epitope
VSELATVKRP

SEQ ID NO: 53828 - protein, 10 aa, Artificial Sequence
  Description of Artificial Sequence: Synthetic epitope
VSELQIYTTQ

SEQ ID NO: 53829 - protein, 10 aa, Artificial Sequence
  Description of Artificial Sequence: Synthetic epitope
VSENVAASAA

SEQ ID NO: 53830 - protein, 10 aa, Artificial Sequence
  Description of Artificial Sequence: Synthetic epitope
VSESAETMTA

SEQ ID NO: 53831 - protein, 10 aa, Artificial Sequence
  Description of Artificial Sequence: Synthetic epitope
VSESEISQEA

SEQ ID NO: 53832 - protein, 10 aa, Artificial Sequence
  Description of Artificial Sequence: Synthetic epitope
VSESPNRKNE

SEQ ID NO: 53833 - protein, 10 aa, Artificial Sequence
  Description of Artificial Sequence: Synthetic epitope
VSESYSAPGA

SEQ ID NO: 53834 - protein, 10 aa, Artificial Sequence
  Description of Artificial Sequence: Synthetic epitope
VSEVTKLLSY

SEQ ID NO: 53835 - protein, 10 aa, Artificial Sequence
  Description of Artificial Sequence: Synthetic epitope
VSFEQKATVQ

SEQ ID NO: 53836 - protein, 10 aa, Artificial Sequence
  Description of Artificial Sequence: Synthetic epitope
VSFTKEVDTN

SEQ ID NO: 53837 - protein, 10 aa, Artificial Sequence
  Description of Artificial Sequence: Synthetic epitope
VSFYFQMHGE

SEQ ID NO: 53838 - protein, 10 aa, Artificial Sequence
  Description of Artificial Sequence: Synthetic epitope
VSGAAQASEE

SEQ ID NO: 53839 - protein, 10 aa, Artificial Sequence
  Description of Artificial Sequence: Synthetic epitope
VSGGSAQESQ

SEQ ID NO: 53840 - protein, 10 aa, Artificial Sequence
  Description of Artificial Sequence: Synthetic epitope
VSGKRVVNPA

SEQ ID NO: 53841 - protein, 10 aa, Artificial Sequence
  Description of Artificial Sequence: Synthetic epitope
VSGLVLSHDV

SEQ ID NO: 53842 - protein, 10 aa, Artificial Sequence
  Description of Artificial Sequence: Synthetic epitope
VSGMQSYKIL

SEQ ID NO: 53843 - protein, 10 aa, Artificial Sequence
  Description of Artificial Sequence: Synthetic epitope
VSGRASAMSN

SEQ ID NO: 53844 - protein, 10 aa, Artificial Sequence
  Description of Artificial Sequence: Synthetic epitope
VSGSVSSAGR

SEQ ID NO: 53845 - protein, 10 aa, Artificial Sequence
  Description of Artificial Sequence: Synthetic epitope
VSHAETTLEL

SEQ ID NO: 53846 - protein, 10 aa, Artificial Sequence
  Description of Artificial Sequence: Synthetic epitope
VSHRTISEDS

SEQ ID NO: 53847 - protein, 10 aa, Artificial Sequence
  Description of Artificial Sequence: Synthetic epitope
VSHTSQVQLS

SEQ ID NO: 53848 - protein, 10 aa, Artificial Sequence
  Description of Artificial Sequence: Synthetic epitope
VSIAASRPSR

SEQ ID NO: 53849 - protein, 10 aa, Artificial Sequence
  Description of Artificial Sequence: Synthetic epitope
VSILAVNYSH

SEQ ID NO: 53850 - protein, 10 aa, Artificial Sequence
  Description of Artificial Sequence: Synthetic epitope
VSILKKRNDT

SEQ ID NO: 53851 - protein, 10 aa, Artificial Sequence
  Description of Artificial Sequence: Synthetic epitope
VSIQEETVAE

SEQ ID NO: 53852 - protein, 10 aa, Artificial Sequence
  Description of Artificial Sequence: Synthetic epitope
VSKALSDTTV

SEQ ID NO: 53853 - protein, 10 aa, Artificial Sequence
  Description of Artificial Sequence: Synthetic epitope
VSKEVKNRAA

SEQ ID NO: 53854 - protein, 10 aa, Artificial Sequence
  Description of Artificial Sequence: Synthetic epitope
VSKHEQKDQY

SEQ ID NO: 53855 - protein, 10 aa, Artificial Sequence
  Description of Artificial Sequence: Synthetic epitope
VSKKTRMKIA

SEQ ID NO: 53856 - protein, 10 aa, Artificial Sequence
  Description of Artificial Sequence: Synthetic epitope
VSKLTSEKKV

SEQ ID NO: 53857 - protein, 10 aa, Artificial Sequence
  Description of Artificial Sequence: Synthetic epitope
VSKLTSGTAL

SEQ ID NO: 53858 - protein, 10 aa, Artificial Sequence
  Description of Artificial Sequence: Synthetic epitope
VSKNASSAAN

SEQ ID NO: 53859 - protein, 10 aa, Artificial Sequence
  Description of Artificial Sequence: Synthetic epitope
VSKNGTSKAL

SEQ ID NO: 53860 - protein, 10 aa, Artificial Sequence
  Description of Artificial Sequence: Synthetic epitope
VSKPSNSASE

SEQ ID NO: 53861 - protein, 10 aa, Artificial Sequence
  Description of Artificial Sequence: Synthetic epitope
VSKSSQASDR

SEQ ID NO: 53862 - protein, 10 aa, Artificial Sequence
  Description of Artificial Sequence: Synthetic epitope
VSKSTERTGQ

SEQ ID NO: 53863 - protein, 10 aa, Artificial Sequence
  Description of Artificial Sequence: Synthetic epitope
VSKTQVGVFK

SEQ ID NO: 53864 - protein, 10 aa, Artificial Sequence
  Description of Artificial Sequence: Synthetic epitope
VSLAALKKAL

SEQ ID NO: 53865 - protein, 10 aa, Artificial Sequence
  Description of Artificial Sequence: Synthetic epitope
VSLAALKKAL

SEQ ID NO: 53866 - protein, 10 aa, Artificial Sequence
  Description of Artificial Sequence: Synthetic epitope
VSLAALKKAL

SEQ ID NO: 53867 - protein, 10 aa, Artificial Sequence
  Description of Artificial Sequence: Synthetic epitope
VSLASKVKDA

SEQ ID NO: 53868 - protein, 10 aa, Artificial Sequence
  Description of Artificial Sequence: Synthetic epitope
VSLASRAYIK

SEQ ID NO: 53869 - protein, 10 aa, Artificial Sequence
  Description of Artificial Sequence: Synthetic epitope
VSLASVTALT

SEQ ID NO: 53870 - protein, 10 aa, Artificial Sequence
  Description of Artificial Sequence: Synthetic epitope
VSLATKAREG

SEQ ID NO: 53871 - protein, 10 aa, Artificial Sequence
  Description of Artificial Sequence: Synthetic epitope
VSLDLILVEE

SEQ ID NO: 53872 - protein, 10 aa, Artificial Sequence
  Description of Artificial Sequence: Synthetic epitope
VSLDSVEPQD

SEQ ID NO: 53873 - protein, 10 aa, Artificial Sequence
  Description of Artificial Sequence: Synthetic epitope
VSLEMSEILP

SEQ ID NO: 53874 - protein, 10 aa, Artificial Sequence
  Description of Artificial Sequence: Synthetic epitope
VSLKDIKNSK

SEQ ID NO: 53875 - protein, 10 aa, Artificial Sequence
  Description of Artificial Sequence: Synthetic epitope
VSLKTNSASK

SEQ ID NO: 53876 - protein, 10 aa, Artificial Sequence
  Description of Artificial Sequence: Synthetic epitope
VSLKTSALGS

SEQ ID NO: 53877 - protein, 10 aa, Artificial Sequence
  Description of Artificial Sequence: Synthetic epitope
VSLLAASEAE

SEQ ID NO: 53878 - protein, 10 aa, Artificial Sequence
  Description of Artificial Sequence: Synthetic epitope
VSLMKLAAKQ

SEQ ID NO: 53879 - protein, 10 aa, Artificial Sequence
  Description of Artificial Sequence: Synthetic epitope
VSLNVKGIKE

SEQ ID NO: 53880 - protein, 10 aa, Artificial Sequence
  Description of Artificial Sequence: Synthetic epitope
VSLRSLAAGR

SEQ ID NO: 53881 - protein, 10 aa, Artificial Sequence
  Description of Artificial Sequence: Synthetic epitope
VSLSEITPAA

SEQ ID NO: 53882 - protein, 10 aa, Artificial Sequence
  Description of Artificial Sequence: Synthetic epitope
VSLSTFEDEE

SEQ ID NO: 53883 - protein, 10 aa, Artificial Sequence
  Description of Artificial Sequence: Synthetic epitope
VSLVSKNYEI

SEQ ID NO: 53884 - protein, 10 aa, Artificial Sequence
  Description of Artificial Sequence: Synthetic epitope
VSMARQAQVD

SEQ ID NO: 53885 - protein, 10 aa, Artificial Sequence
  Description of Artificial Sequence: Synthetic epitope
VSMHNAAREM

SEQ ID NO: 53886 - protein, 10 aa, Artificial Sequence
  Description of Artificial Sequence: Synthetic epitope
VSMSTVSAHP

SEQ ID NO: 53887 - protein, 10 aa, Artificial Sequence
  Description of Artificial Sequence: Synthetic epitope
VSMVEGQGEK

SEQ ID NO: 53888 - protein, 10 aa, Artificial Sequence
  Description of Artificial Sequence: Synthetic epitope
VSNASLTTSV

SEQ ID NO: 53889 - protein, 10 aa, Artificial Sequence
  Description of Artificial Sequence: Synthetic epitope
VSNASVAQLH

SEQ ID NO: 53890 - protein, 10 aa, Artificial Sequence
  Description of Artificial Sequence: Synthetic epitope
VSNDVLLAGA

SEQ ID NO: 53891 - protein, 10 aa, Artificial Sequence
  Description of Artificial Sequence: Synthetic epitope
VSNEVQTAKE

SEQ ID NO: 53892 - protein, 10 aa, Artificial Sequence
  Description of Artificial Sequence: Synthetic epitope
VSNNVSQTLD

SEQ ID NO: 53893 - protein, 10 aa, Artificial Sequence
  Description of Artificial Sequence: Synthetic epitope
VSNPISNNSQ

SEQ ID NO: 53894 - protein, 10 aa, Artificial Sequence
  Description of Artificial Sequence: Synthetic epitope
VSNSRTSSTE

SEQ ID NO: 53895 - protein, 10 aa, Artificial Sequence
  Description of Artificial Sequence: Synthetic epitope
VSPMAKVPAE

SEQ ID NO: 53896 - protein, 10 aa, Artificial Sequence
  Description of Artificial Sequence: Synthetic epitope
VSPYSSLTKE

SEQ ID NO: 53897 - protein, 10 aa, Artificial Sequence
  Description of Artificial Sequence: Synthetic epitope
VSQASMSSRM

SEQ ID NO: 53898 - protein, 10 aa, Artificial Sequence
  Description of Artificial Sequence: Synthetic epitope
VSQATSSTAV

SEQ ID NO: 53899 - protein, 10 aa, Artificial Sequence
  Description of Artificial Sequence: Synthetic epitope
VSQAVASTTP

SEQ ID NO: 53900 - protein, 10 aa, Artificial Sequence
  Description of Artificial Sequence: Synthetic epitope
VSQAVDSVLQ

SEQ ID NO: 53901 - protein, 10 aa, Artificial Sequence
  Description of Artificial Sequence: Synthetic epitope
VSQDKQMLYT

SEQ ID NO: 53902 - protein, 10 aa, Artificial Sequence
  Description of Artificial Sequence: Synthetic epitope
VSQLLQLKLG

SEQ ID NO: 53903 - protein, 10 aa, Artificial Sequence
  Description of Artificial Sequence: Synthetic epitope
VSQTASVTTD

SEQ ID NO: 53904 - protein, 10 aa, Artificial Sequence
  Description of Artificial Sequence: Synthetic epitope
VSQVAVVLLM

SEQ ID NO: 53905 - protein, 10 aa, Artificial Sequence
  Description of Artificial Sequence: Synthetic epitope
VSQVISAEEF

SEQ ID NO: 53906 - protein, 10 aa, Artificial Sequence
  Description of Artificial Sequence: Synthetic epitope
VSQVNRINET

SEQ ID NO: 53907 - protein, 10 aa, Artificial Sequence
  Description of Artificial Sequence: Synthetic epitope
VSRFNLSKVA

SEQ ID NO: 53908 - protein, 10 aa, Artificial Sequence
  Description of Artificial Sequence: Synthetic epitope
VSRGGMRKFI

SEQ ID NO: 53909 - protein, 10 aa, Artificial Sequence
  Description of Artificial Sequence: Synthetic epitope
VSRHARTSQN

SEQ ID NO: 53910 - protein, 10 aa, Artificial Sequence
  Description of Artificial Sequence: Synthetic epitope
VSRIKMAQKL

SEQ ID NO: 53911 - protein, 10 aa, Artificial Sequence
  Description of Artificial Sequence: Synthetic epitope
VSRKKVLSLN

SEQ ID NO: 53912 - protein, 10 aa, Artificial Sequence
  Description of Artificial Sequence: Synthetic epitope
VSRNSISDDR

SEQ ID NO: 53913 - protein, 10 aa, Artificial Sequence
  Description of Artificial Sequence: Synthetic epitope
VSRPSLLADS

SEQ ID NO: 53914 - protein, 10 aa, Artificial Sequence
  Description of Artificial Sequence: Synthetic epitope
VSRPTKFVVS

SEQ ID NO: 53915 - protein, 10 aa, Artificial Sequence
  Description of Artificial Sequence: Synthetic epitope
VSSAGQLDRD

SEQ ID NO: 53916 - protein, 10 aa, Artificial Sequence
  Description of Artificial Sequence: Synthetic epitope
VSSASTAHPS

SEQ ID NO: 53917 - protein, 10 aa, Artificial Sequence
  Description of Artificial Sequence: Synthetic epitope
VSSGFGLSKL

SEQ ID NO: 53918 - protein, 10 aa, Artificial Sequence
  Description of Artificial Sequence: Synthetic epitope
VSSITKVSVV

SEQ ID NO: 53919 - protein, 10 aa, Artificial Sequence
  Description of Artificial Sequence: Synthetic epitope
VSSKALQRQN

SEQ ID NO: 53920 - protein, 10 aa, Artificial Sequence
  Description of Artificial Sequence: Synthetic epitope
VSSLQLKGQS

SEQ ID NO: 53921 - protein, 10 aa, Artificial Sequence
  Description of Artificial Sequence: Synthetic epitope
VSSLSEQKTS

SEQ ID NO: 53922 - protein, 10 aa, Artificial Sequence
  Description of Artificial Sequence: Synthetic epitope
VSSLSLSTGH

SEQ ID NO: 53923 - protein, 10 aa, Artificial Sequence
  Description of Artificial Sequence: Synthetic epitope
VSSNTRRNED

SEQ ID NO: 53924 - protein, 10 aa, Artificial Sequence
  Description of Artificial Sequence: Synthetic epitope
VSSPSKGKTS

SEQ ID NO: 53925 - protein, 10 aa, Artificial Sequence
  Description of Artificial Sequence: Synthetic epitope
VSSQASTGST

SEQ ID NO: 53926 - protein, 10 aa, Artificial Sequence
  Description of Artificial Sequence: Synthetic epitope
VSSQQSYQKK

SEQ ID NO: 53927 - protein, 10 aa, Artificial Sequence
  Description of Artificial Sequence: Synthetic epitope
VSSQSKETPV

SEQ ID NO: 53928 - protein, 10 aa, Artificial Sequence
  Description of Artificial Sequence: Synthetic epitope
VSSRLTTEQI

SEQ ID NO: 53929 - protein, 10 aa, Artificial Sequence
  Description of Artificial Sequence: Synthetic epitope
VSSRSAAEKE

SEQ ID NO: 53930 - protein, 10 aa, Artificial Sequence
  Description of Artificial Sequence: Synthetic epitope
VSSTAEQQES

SEQ ID NO: 53931 - protein, 10 aa, Artificial Sequence
  Description of Artificial Sequence: Synthetic epitope
VSSTQGDMMQ

SEQ ID NO: 53932 - protein, 10 aa, Artificial Sequence
  Description of Artificial Sequence: Synthetic epitope
VSSVSTDSAG

SEQ ID NO: 53933 - protein, 10 aa, Artificial Sequence
  Description of Artificial Sequence: Synthetic epitope
VSTALKSWTD

SEQ ID NO: 53934 - protein, 10 aa, Artificial Sequence
  Description of Artificial Sequence: Synthetic epitope
VSTEDSKTIQ

SEQ ID NO: 53935 - protein, 10 aa, Artificial Sequence
  Description of Artificial Sequence: Synthetic epitope
VSTEIKVDKN

SEQ ID NO: 53936 - protein, 10 aa, Artificial Sequence
  Description of Artificial Sequence: Synthetic epitope
VSTESAAVAI

SEQ ID NO: 53937 - protein, 10 aa, Artificial Sequence
  Description of Artificial Sequence: Synthetic epitope
VSTEVTLAVK

SEQ ID NO: 53938 - protein, 10 aa, Artificial Sequence
  Description of Artificial Sequence: Synthetic epitope
VSTLQSSKPK

SEQ ID NO: 53939 - protein, 10 aa, Artificial Sequence
  Description of Artificial Sequence: Synthetic epitope
VSTNMTPKAL

SEQ ID NO: 53940 - protein, 10 aa, Artificial Sequence
  Description of Artificial Sequence: Synthetic epitope
VSTPTPSSIQ

SEQ ID NO: 53941 - protein, 10 aa, Artificial Sequence
  Description of Artificial Sequence: Synthetic epitope
VSTQLTTNQT

SEQ ID NO: 53942 - protein, 10 aa, Artificial Sequence
  Description of Artificial Sequence: Synthetic epitope
VSTSAGGIMT

SEQ ID NO: 53943 - protein, 10 aa, Artificial Sequence
  Description of Artificial Sequence: Synthetic epitope
VSTSASFSGA

SEQ ID NO: 53944 - protein, 10 aa, Artificial Sequence
  Description of Artificial Sequence: Synthetic epitope
VSTSAVDNNE

SEQ ID NO: 53945 - protein, 10 aa, Artificial Sequence
  Description of Artificial Sequence: Synthetic epitope
VSTSESSAGA

SEQ ID NO: 53946 - protein, 10 aa, Artificial Sequence
  Description of Artificial Sequence: Synthetic epitope
VSTSSDMDHN

SEQ ID NO: 53947 - protein, 10 aa, Artificial Sequence
  Description of Artificial Sequence: Synthetic epitope
VSTTSKRENI

SEQ ID NO: 53948 - protein, 10 aa, Artificial Sequence
  Description of Artificial Sequence: Synthetic epitope
VSTVGQISSQ

SEQ ID NO: 53949 - protein, 10 aa, Artificial Sequence
  Description of Artificial Sequence: Synthetic epitope
VSTVSQTMGE

SEQ ID NO: 53950 - protein, 10 aa, Artificial Sequence
  Description of Artificial Sequence: Synthetic epitope
VSVESQQVQQ

SEQ ID NO: 53951 - protein, 10 aa, Artificial Sequence
  Description of Artificial Sequence: Synthetic epitope
VSVKKLNLEQ

SEQ ID NO: 53952 - protein, 10 aa, Artificial Sequence
  Description of Artificial Sequence: Synthetic epitope
VSVLAAQKTG

SEQ ID NO: 53953 - protein, 10 aa, Artificial Sequence
  Description of Artificial Sequence: Synthetic epitope
VSVLQIHVTQ

SEQ ID NO: 53954 - protein, 10 aa, Artificial Sequence
  Description of Artificial Sequence: Synthetic epitope
VSVQRAFVHP

SEQ ID NO: 53955 - protein, 10 aa, Artificial Sequence
  Description of Artificial Sequence: Synthetic epitope
VSVRQQSTND

SEQ ID NO: 53956 - protein, 10 aa, Artificial Sequence
  Description of Artificial Sequence: Synthetic epitope
VSVSISSQGG

SEQ ID NO: 53957 - protein, 10 aa, Artificial Sequence
  Description of Artificial Sequence: Synthetic epitope
VSVTHKAIEK

SEQ ID NO: 53958 - protein, 10 aa, Artificial Sequence
  Description of Artificial Sequence: Synthetic epitope
VSVTQFWINA

SEQ ID NO: 53959 - protein, 10 aa, Artificial Sequence
  Description of Artificial Sequence: Synthetic epitope
VSVTTPVPKQ

SEQ ID NO: 53960 - protein, 10 aa, Artificial Sequence
  Description of Artificial Sequence: Synthetic epitope
VSVVHDTSTE

SEQ ID NO: 53961 - protein, 10 aa, Artificial Sequence
  Description of Artificial Sequence: Synthetic epitope
VSWAHQFPYA

SEQ ID NO: 53962 - protein, 10 aa, Artificial Sequence
  Description of Artificial Sequence: Synthetic epitope
VSWMLAMEEL

SEQ ID NO: 53963 - protein, 10 aa, Artificial Sequence
  Description of Artificial Sequence: Synthetic epitope
VSWSHSSMLP

SEQ ID NO: 53964 - protein, 10 aa, Artificial Sequence
  Description of Artificial Sequence: Synthetic epitope
VSYKVWFWVG

SEQ ID NO: 53965 - protein, 10 aa, Artificial Sequence
  Description of Artificial Sequence: Synthetic epitope
VSYLKLVSKA

SEQ ID NO: 53966 - protein, 10 aa, Artificial Sequence
  Description of Artificial Sequence: Synthetic epitope
VSYQLSSRST

SEQ ID NO: 53967 - protein, 10 aa, Artificial Sequence
  Description of Artificial Sequence: Synthetic epitope
VTAEEFKLKD

SEQ ID NO: 53968 - protein, 10 aa, Artificial Sequence
  Description of Artificial Sequence: Synthetic epitope
VTAEQSKAES

SEQ ID NO: 53969 - protein, 10 aa, Artificial Sequence
  Description of Artificial Sequence: Synthetic epitope
VTAKSQQSGE

SEQ ID NO: 53970 - protein, 10 aa, Artificial Sequence
  Description of Artificial Sequence: Synthetic epitope
VTALVPSEAA

SEQ ID NO: 53971 - protein, 10 aa, Artificial Sequence
  Description of Artificial Sequence: Synthetic epitope
VTATAASKTP

SEQ ID NO: 53972 - protein, 10 aa, Artificial Sequence
  Description of Artificial Sequence: Synthetic epitope
VTDRYFRIQE

SEQ ID NO: 53973 - protein, 10 aa, Artificial Sequence
  Description of Artificial Sequence: Synthetic epitope
VTDTTLVPEP

SEQ ID NO: 53974 - protein, 10 aa, Artificial Sequence
  Description of Artificial Sequence: Synthetic epitope
VTEAEQAEEQ

SEQ ID NO: 53975 - protein, 10 aa, Artificial Sequence
  Description of Artificial Sequence: Synthetic epitope
VTEDSSTSEI

SEQ ID NO: 53976 - protein, 10 aa, Artificial Sequence
  Description of Artificial Sequence: Synthetic epitope
VTEKAGMQLN

SEQ ID NO: 53977 - protein, 10 aa, Artificial Sequence
  Description of Artificial Sequence: Synthetic epitope
VTEKEVVKLQ

SEQ ID NO: 53978 - protein, 10 aa, Artificial Sequence
  Description of Artificial Sequence: Synthetic epitope
VTEKQQFAKP

SEQ ID NO: 53979 - protein, 10 aa, Artificial Sequence
  Description of Artificial Sequence: Synthetic epitope
VTEKSRQKEA

SEQ ID NO: 53980 - protein, 10 aa, Artificial Sequence
  Description of Artificial Sequence: Synthetic epitope
VTELIQAAEA

SEQ ID NO: 53981 - protein, 10 aa, Artificial Sequence
  Description of Artificial Sequence: Synthetic epitope
VTEMISEESG

SEQ ID NO: 53982 - protein, 10 aa, Artificial Sequence
  Description of Artificial Sequence: Synthetic epitope
VTEQHRQMGK

SEQ ID NO: 53983 - protein, 10 aa, Artificial Sequence
  Description of Artificial Sequence: Synthetic epitope
VTESASVMPS

SEQ ID NO: 53984 - protein, 10 aa, Artificial Sequence
  Description of Artificial Sequence: Synthetic epitope
VTESEKALQS

SEQ ID NO: 53985 - protein, 10 aa, Artificial Sequence
  Description of Artificial Sequence: Synthetic epitope
VTESIESSEL

SEQ ID NO: 53986 - protein, 10 aa, Artificial Sequence
  Description of Artificial Sequence: Synthetic epitope
VTESKESILG

SEQ ID NO: 53987 - protein, 10 aa, Artificial Sequence
  Description of Artificial Sequence: Synthetic epitope
VTETISETTE

SEQ ID NO: 53988 - protein, 10 aa, Artificial Sequence
  Description of Artificial Sequence: Synthetic epitope
VTFANPQVKT

SEQ ID NO: 53989 - protein, 10 aa, Artificial Sequence
  Description of Artificial Sequence: Synthetic epitope
VTFEKALNAG

SEQ ID NO: 53990 - protein, 10 aa, Artificial Sequence
  Description of Artificial Sequence: Synthetic epitope
VTGGKNYAII

SEQ ID NO: 53991 - protein, 10 aa, Artificial Sequence
  Description of Artificial Sequence: Synthetic epitope
VTGKRLQTVK

SEQ ID NO: 53992 - protein, 10 aa, Artificial Sequence
  Description of Artificial Sequence: Synthetic epitope
VTGQEIAALK

SEQ ID NO: 53993 - protein, 10 aa, Artificial Sequence
  Description of Artificial Sequence: Synthetic epitope
VTGQSVERAS

SEQ ID NO: 53994 - protein, 10 aa, Artificial Sequence
  Description of Artificial Sequence: Synthetic epitope
VTHSNQALNQ

SEQ ID NO: 53995 - protein, 10 aa, Artificial Sequence
  Description of Artificial Sequence: Synthetic epitope
VTIEASLKQK

SEQ ID NO: 53996 - protein, 10 aa, Artificial Sequence
  Description of Artificial Sequence: Synthetic epitope
VTIERSKSKI

SEQ ID NO: 53997 - protein, 10 aa, Artificial Sequence
  Description of Artificial Sequence: Synthetic epitope
VTILPLPLQN

SEQ ID NO: 53998 - protein, 10 aa, Artificial Sequence
  Description of Artificial Sequence: Synthetic epitope
VTIQNMTSSY

SEQ ID NO: 53999 - protein, 10 aa, Artificial Sequence
  Description of Artificial Sequence: Synthetic epitope
VTITEKSVAS

SEQ ID NO: 54000 - protein, 10 aa, Artificial Sequence
  Description of Artificial Sequence: Synthetic epitope
VTITSSAELF

SEQ ID NO: 54001 - protein, 10 aa, Artificial Sequence
  Description of Artificial Sequence: Synthetic epitope
VTKARLTDKH

SEQ ID NO: 54002 - protein, 10 aa, Artificial Sequence
  Description of Artificial Sequence: Synthetic epitope
VTKDTASDSP

SEQ ID NO: 54003 - protein, 10 aa, Artificial Sequence
  Description of Artificial Sequence: Synthetic epitope
VTKKAVSTSS

SEQ ID NO: 54004 - protein, 10 aa, Artificial Sequence
  Description of Artificial Sequence: Synthetic epitope
VTKRFSTPDA

SEQ ID NO: 54005 - protein, 10 aa, Artificial Sequence
  Description of Artificial Sequence: Synthetic epitope
VTKYQKRKNK

SEQ ID NO: 54006 - protein, 10 aa, Artificial Sequence
  Description of Artificial Sequence: Synthetic epitope
VTLAKLLAES

SEQ ID NO: 54007 - protein, 10 aa, Artificial Sequence
  Description of Artificial Sequence: Synthetic epitope
VTLASALQVR

SEQ ID NO: 54008 - protein, 10 aa, Artificial Sequence
  Description of Artificial Sequence: Synthetic epitope
VTLETKLETL

SEQ ID NO: 54009 - protein, 10 aa, Artificial Sequence
  Description of Artificial Sequence: Synthetic epitope
VTLGAQEEGR

SEQ ID NO: 54010 - protein, 10 aa, Artificial Sequence
  Description of Artificial Sequence: Synthetic epitope
VTLKRALEAK

SEQ ID NO: 54011 - protein, 10 aa, Artificial Sequence
  Description of Artificial Sequence: Synthetic epitope
VTLPAVFKAP

SEQ ID NO: 54012 - protein, 10 aa, Artificial Sequence
  Description of Artificial Sequence: Synthetic epitope
VTLQMPSVAA

SEQ ID NO: 54013 - protein, 10 aa, Artificial Sequence
  Description of Artificial Sequence: Synthetic epitope
VTLRSAKSEE

SEQ ID NO: 54014 - protein, 10 aa, Artificial Sequence
  Description of Artificial Sequence: Synthetic epitope
VTLSTSKSLS

SEQ ID NO: 54015 - protein, 10 aa, Artificial Sequence
  Description of Artificial Sequence: Synthetic epitope
VTLSVKADFP

SEQ ID NO: 54016 - protein, 10 aa, Artificial Sequence
  Description of Artificial Sequence: Synthetic epitope
VTMSGEASAP

SEQ ID NO: 54017 - protein, 10 aa, Artificial Sequence
  Description of Artificial Sequence: Synthetic epitope
VTMSREVEEI

SEQ ID NO: 54018 - protein, 10 aa, Artificial Sequence
  Description of Artificial Sequence: Synthetic epitope
VTNLSQTDEI

SEQ ID NO: 54019 - protein, 10 aa, Artificial Sequence
  Description of Artificial Sequence: Synthetic epitope
VTNTSMMTSE

SEQ ID NO: 54020 - protein, 10 aa, Artificial Sequence
  Description of Artificial Sequence: Synthetic epitope
VTPALQMKKP

SEQ ID NO: 54021 - protein, 10 aa, Artificial Sequence
  Description of Artificial Sequence: Synthetic epitope
VTPARVQFKT

SEQ ID NO: 54022 - protein, 10 aa, Artificial Sequence
  Description of Artificial Sequence: Synthetic epitope
VTPEPSKKEW

SEQ ID NO: 54023 - protein, 10 aa, Artificial Sequence
  Description of Artificial Sequence: Synthetic epitope
VTPESSEHED

SEQ ID NO: 54024 - protein, 10 aa, Artificial Sequence
  Description of Artificial Sequence: Synthetic epitope
VTQARKNTIT

SEQ ID NO: 54025 - protein, 10 aa, Artificial Sequence
  Description of Artificial Sequence: Synthetic epitope
VTQIQHIHKL

SEQ ID NO: 54026 - protein, 10 aa, Artificial Sequence
  Description of Artificial Sequence: Synthetic epitope
VTQKATPNPS

SEQ ID NO: 54027 - protein, 10 aa, Artificial Sequence
  Description of Artificial Sequence: Synthetic epitope
VTQNLRATVG

SEQ ID NO: 54028 - protein, 10 aa, Artificial Sequence
  Description of Artificial Sequence: Synthetic epitope
VTQSGLSQQV

SEQ ID NO: 54029 - protein, 10 aa, Artificial Sequence
  Description of Artificial Sequence: Synthetic epitope
VTQTKAKAWA

SEQ ID NO: 54030 - protein, 10 aa, Artificial Sequence
  Description of Artificial Sequence: Synthetic epitope
VTRAPSIQAK

SEQ ID NO: 54031 - protein, 10 aa, Artificial Sequence
  Description of Artificial Sequence: Synthetic epitope
VTREAQPKTR

SEQ ID NO: 54032 - protein, 10 aa, Artificial Sequence
  Description of Artificial Sequence: Synthetic epitope
VTRELLTSSQ

SEQ ID NO: 54033 - protein, 10 aa, Artificial Sequence
  Description of Artificial Sequence: Synthetic epitope
VTRKTVTVGE

SEQ ID NO: 54034 - protein, 10 aa, Artificial Sequence
  Description of Artificial Sequence: Synthetic epitope
VTRSLIKSKI

SEQ ID NO: 54035 - protein, 10 aa, Artificial Sequence
  Description of Artificial Sequence: Synthetic epitope
VTRSQQETGN

SEQ ID NO: 54036 - protein, 10 aa, Artificial Sequence
  Description of Artificial Sequence: Synthetic epitope
VTRSTVKISE

SEQ ID NO: 54037 - protein, 10 aa, Artificial Sequence
  Description of Artificial Sequence: Synthetic epitope
VTSEASLKNL

SEQ ID NO: 54038 - protein, 10 aa, Artificial Sequence
  Description of Artificial Sequence: Synthetic epitope
VTSEDQVQEG

SEQ ID NO: 54039 - protein, 10 aa, Artificial Sequence
  Description of Artificial Sequence: Synthetic epitope
VTSESEQEFL

SEQ ID NO: 54040 - protein, 10 aa, Artificial Sequence
  Description of Artificial Sequence: Synthetic epitope
VTSETKSLQQ

SEQ ID NO: 54041 - protein, 10 aa, Artificial Sequence
  Description of Artificial Sequence: Synthetic epitope
VTSINSRVPD

SEQ ID NO: 54042 - protein, 10 aa, Artificial Sequence
  Description of Artificial Sequence: Synthetic epitope
VTSMTIIEQV

SEQ ID NO: 54043 - protein, 10 aa, Artificial Sequence
  Description of Artificial Sequence: Synthetic epitope
VTSNASTTKY

SEQ ID NO: 54044 - protein, 10 aa, Artificial Sequence
  Description of Artificial Sequence: Synthetic epitope
VTSPLAVNEN

SEQ ID NO: 54045 - protein, 10 aa, Artificial Sequence
  Description of Artificial Sequence: Synthetic epitope
VTSQATTLST

SEQ ID NO: 54046 - protein, 10 aa, Artificial Sequence
  Description of Artificial Sequence: Synthetic epitope
VTSQVSSTGP

SEQ ID NO: 54047 - protein, 10 aa, Artificial Sequence
  Description of Artificial Sequence: Synthetic epitope
VTSRERVARP

SEQ ID NO: 54048 - protein, 10 aa, Artificial Sequence
  Description of Artificial Sequence: Synthetic epitope
VTSSETVVKP

SEQ ID NO: 54049 - protein, 10 aa, Artificial Sequence
  Description of Artificial Sequence: Synthetic epitope
VTSSQVQPVT

SEQ ID NO: 54050 - protein, 10 aa, Artificial Sequence
  Description of Artificial Sequence: Synthetic epitope
VTSTIATGSL

SEQ ID NO: 54051 - protein, 10 aa, Artificial Sequence
  Description of Artificial Sequence: Synthetic epitope
VTSVSSDSQT

SEQ ID NO: 54052 - protein, 10 aa, Artificial Sequence
  Description of Artificial Sequence: Synthetic epitope
VTSVTSEPTR

SEQ ID NO: 54053 - protein, 10 aa, Artificial Sequence
  Description of Artificial Sequence: Synthetic epitope
VTSYKRYLWA

SEQ ID NO: 54054 - protein, 10 aa, Artificial Sequence
  Description of Artificial Sequence: Synthetic epitope
VTTDDFASKT

SEQ ID NO: 54055 - protein, 10 aa, Artificial Sequence
  Description of Artificial Sequence: Synthetic epitope
VTTDLQIVEL

SEQ ID NO: 54056 - protein, 10 aa, Artificial Sequence
  Description of Artificial Sequence: Synthetic epitope
VTTDQASSGS

SEQ ID NO: 54057 - protein, 10 aa, Artificial Sequence
  Description of Artificial Sequence: Synthetic epitope
VTTFKTIQQI

SEQ ID NO: 54058 - protein, 10 aa, Artificial Sequence
  Description of Artificial Sequence: Synthetic epitope
VTTIKQTASP

SEQ ID NO: 54059 - protein, 10 aa, Artificial Sequence
  Description of Artificial Sequence: Synthetic epitope
VTTIKTIEEN

SEQ ID NO: 54060 - protein, 10 aa, Artificial Sequence
  Description of Artificial Sequence: Synthetic epitope
VTTISHIKRE

SEQ ID NO: 54061 - protein, 10 aa, Artificial Sequence
  Description of Artificial Sequence: Synthetic epitope
VTTSSKLEEW

SEQ ID NO: 54062 - protein, 10 aa, Artificial Sequence
  Description of Artificial Sequence: Synthetic epitope
VTTVLRPTSQ

SEQ ID NO: 54063 - protein, 10 aa, Artificial Sequence
  Description of Artificial Sequence: Synthetic epitope
VTTVQSLQQK

SEQ ID NO: 54064 - protein, 10 aa, Artificial Sequence
  Description of Artificial Sequence: Synthetic epitope
VTVNKATMKT

SEQ ID NO: 54065 - protein, 10 aa, Artificial Sequence
  Description of Artificial Sequence: Synthetic epitope
VTVSREATTL

SEQ ID NO: 54066 - protein, 10 aa, Artificial Sequence
  Description of Artificial Sequence: Synthetic epitope
VTVTTEIPPR

SEQ ID NO: 54067 - protein, 10 aa, Artificial Sequence
  Description of Artificial Sequence: Synthetic epitope
VTWKMITEFG

SEQ ID NO: 54068 - protein, 10 aa, Artificial Sequence
  Description of Artificial Sequence: Synthetic epitope
VTYVAMLAKQ

SEQ ID NO: 54069 - protein, 10 aa, Artificial Sequence
  Description of Artificial Sequence: Synthetic epitope
VVAASSMATS

SEQ ID NO: 54070 - protein, 10 aa, Artificial Sequence
  Description of Artificial Sequence: Synthetic epitope
VVADQLLITR

SEQ ID NO: 54071 - protein, 10 aa, Artificial Sequence
  Description of Artificial Sequence: Synthetic epitope
VVAKAPVKAA

SEQ ID NO: 54072 - protein, 10 aa, Artificial Sequence
  Description of Artificial Sequence: Synthetic epitope
VVAQEAQSLG

SEQ ID NO: 54073 - protein, 10 aa, Artificial Sequence
  Description of Artificial Sequence: Synthetic epitope
VVAQIQAQQS

SEQ ID NO: 54074 - protein, 10 aa, Artificial Sequence
  Description of Artificial Sequence: Synthetic epitope
VVARAEAEEK

SEQ ID NO: 54075 - protein, 10 aa, Artificial Sequence
  Description of Artificial Sequence: Synthetic epitope
VVASSLKRQA

SEQ ID NO: 54076 - protein, 10 aa, Artificial Sequence
  Description of Artificial Sequence: Synthetic epitope
VVASTISGKS

SEQ ID NO: 54077 - protein, 10 aa, Artificial Sequence
  Description of Artificial Sequence: Synthetic epitope
VVAVLALGAP

SEQ ID NO: 54078 - protein, 10 aa, Artificial Sequence
  Description of Artificial Sequence: Synthetic epitope
VVDDVKAQEI

SEQ ID NO: 54079 - protein, 10 aa, Artificial Sequence
  Description of Artificial Sequence: Synthetic epitope
VVDEELSKLG

SEQ ID NO: 54080 - protein, 10 aa, Artificial Sequence
  Description of Artificial Sequence: Synthetic epitope
VVDERRAVEE

SEQ ID NO: 54081 - protein, 10 aa, Artificial Sequence
  Description of Artificial Sequence: Synthetic epitope
VVDPRIVRRY

SEQ ID NO: 54082 - protein, 10 aa, Artificial Sequence
  Description of Artificial Sequence: Synthetic epitope
VVDRAAYSLT

SEQ ID NO: 54083 - protein, 10 aa, Artificial Sequence
  Description of Artificial Sequence: Synthetic epitope
VVDWRKYEQE

SEQ ID NO: 54084 - protein, 10 aa, Artificial Sequence
  Description of Artificial Sequence: Synthetic epitope
VVEAVARASL

SEQ ID NO: 54085 - protein, 10 aa, Artificial Sequence
  Description of Artificial Sequence: Synthetic epitope
VVEEQYEESF

SEQ ID NO: 54086 - protein, 10 aa, Artificial Sequence
  Description of Artificial Sequence: Synthetic epitope
VVEFERETED

SEQ ID NO: 54087 - protein, 10 aa, Artificial Sequence
  Description of Artificial Sequence: Synthetic epitope
VVEFQRAQSL

SEQ ID NO: 54088 - protein, 10 aa, Artificial Sequence
  Description of Artificial Sequence: Synthetic epitope
VVEKSKESTA

SEQ ID NO: 54089 - protein, 10 aa, Artificial Sequence
  Description of Artificial Sequence: Synthetic epitope
VVFEKAIQRT

SEQ ID NO: 54090 - protein, 10 aa, Artificial Sequence
  Description of Artificial Sequence: Synthetic epitope
VVFNVIYQSA

SEQ ID NO: 54091 - protein, 10 aa, Artificial Sequence
  Description of Artificial Sequence: Synthetic epitope
VVGAAGLASI

SEQ ID NO: 54092 - protein, 10 aa, Artificial Sequence
  Description of Artificial Sequence: Synthetic epitope
VVGGTATEGL

SEQ ID NO: 54093 - protein, 10 aa, Artificial Sequence
  Description of Artificial Sequence: Synthetic epitope
VVGNSNSQNK

SEQ ID NO: 54094 - protein, 10 aa, Artificial Sequence
  Description of Artificial Sequence: Synthetic epitope
VVHLTLALLK

SEQ ID NO: 54095 - protein, 10 aa, Artificial Sequence
  Description of Artificial Sequence: Synthetic epitope
VVHSALQEER

SEQ ID NO: 54096 - protein, 10 aa, Artificial Sequence
  Description of Artificial Sequence: Synthetic epitope
VVHSITWKQM

SEQ ID NO: 54097 - protein, 10 aa, Artificial Sequence
  Description of Artificial Sequence: Synthetic epitope
VVHSSRSQTR

SEQ ID NO: 54098 - protein, 10 aa, Artificial Sequence
  Description of Artificial Sequence: Synthetic epitope
VVIEVANHAN

SEQ ID NO: 54099 - protein, 10 aa, Artificial Sequence
  Description of Artificial Sequence: Synthetic epitope
VVIVASQLDN

SEQ ID NO: 54100 - protein, 10 aa, Artificial Sequence
  Description of Artificial Sequence: Synthetic epitope
VVKENSTEAE

SEQ ID NO: 54101 - protein, 10 aa, Artificial Sequence
  Description of Artificial Sequence: Synthetic epitope
VVKKSEERPM

SEQ ID NO: 54102 - protein, 10 aa, Artificial Sequence
  Description of Artificial Sequence: Synthetic epitope
VVKPIKVKRK

SEQ ID NO: 54103 - protein, 10 aa, Artificial Sequence
  Description of Artificial Sequence: Synthetic epitope
VVKPRMVSEE

SEQ ID NO: 54104 - protein, 10 aa, Artificial Sequence
  Description of Artificial Sequence: Synthetic epitope
VVKSEESPVY

SEQ ID NO: 54105 - protein, 10 aa, Artificial Sequence
  Description of Artificial Sequence: Synthetic epitope
VVKTEYKATE

SEQ ID NO: 54106 - protein, 10 aa, Artificial Sequence
  Description of Artificial Sequence: Synthetic epitope
VVKTMQFEPS

SEQ ID NO: 54107 - protein, 10 aa, Artificial Sequence
  Description of Artificial Sequence: Synthetic epitope
VVKVDLTQSS

SEQ ID NO: 54108 - protein, 10 aa, Artificial Sequence
  Description of Artificial Sequence: Synthetic epitope
VVLAFQKASS

SEQ ID NO: 54109 - protein, 10 aa, Artificial Sequence
  Description of Artificial Sequence: Synthetic epitope
VVLREALQDD

SEQ ID NO: 54110 - protein, 10 aa, Artificial Sequence
  Description of Artificial Sequence: Synthetic epitope
VVMETANRVL

SEQ ID NO: 54111 - protein, 10 aa, Artificial Sequence
  Description of Artificial Sequence: Synthetic epitope
VVNEKPVLEA

SEQ ID NO: 54112 - protein, 10 aa, Artificial Sequence
  Description of Artificial Sequence: Synthetic epitope
VVNEKTQAVV

SEQ ID NO: 54113 - protein, 10 aa, Artificial Sequence
  Description of Artificial Sequence: Synthetic epitope
VVNIVLAKSK

SEQ ID NO: 54114 - protein, 10 aa, Artificial Sequence
  Description of Artificial Sequence: Synthetic epitope
VVNPVATEDT

SEQ ID NO: 54115 - protein, 10 aa, Artificial Sequence
  Description of Artificial Sequence: Synthetic epitope
VVNVDQLWED

SEQ ID NO: 54116 - protein, 10 aa, Artificial Sequence
  Description of Artificial Sequence: Synthetic epitope
VVPKIQDQDS

SEQ ID NO: 54117 - protein, 10 aa, Artificial Sequence
  Description of Artificial Sequence: Synthetic epitope
VVPQNSSARS

SEQ ID NO: 54118 - protein, 10 aa, Artificial Sequence
  Description of Artificial Sequence: Synthetic epitope
VVQSIKLITE

SEQ ID NO: 54119 - protein, 10 aa, Artificial Sequence
  Description of Artificial Sequence: Synthetic epitope
VVQVFIAVER

SEQ ID NO: 54120 - protein, 10 aa, Artificial Sequence
  Description of Artificial Sequence: Synthetic epitope
VVSAALVAEP

SEQ ID NO: 54121 - protein, 10 aa, Artificial Sequence
  Description of Artificial Sequence: Synthetic epitope
VVSDSRLAKT

SEQ ID NO: 54122 - protein, 10 aa, Artificial Sequence
  Description of Artificial Sequence: Synthetic epitope
VVSMSPAQLG

SEQ ID NO: 54123 - protein, 10 aa, Artificial Sequence
  Description of Artificial Sequence: Synthetic epitope
VVSPASDYKD

SEQ ID NO: 54124 - protein, 10 aa, Artificial Sequence
  Description of Artificial Sequence: Synthetic epitope
VVSPTKKVAV

SEQ ID NO: 54125 - protein, 10 aa, Artificial Sequence
  Description of Artificial Sequence: Synthetic epitope
VVSQDENQSE

SEQ ID NO: 54126 - protein, 10 aa, Artificial Sequence
  Description of Artificial Sequence: Synthetic epitope
VVSQWSTSAS

SEQ ID NO: 54127 - protein, 10 aa, Artificial Sequence
  Description of Artificial Sequence: Synthetic epitope
VVSRLKVIVG

SEQ ID NO: 54128 - protein, 10 aa, Artificial Sequence
  Description of Artificial Sequence: Synthetic epitope
VVSTQRSQDH

SEQ ID NO: 54129 - protein, 10 aa, Artificial Sequence
  Description of Artificial Sequence: Synthetic epitope
VVSTSDKKMP

SEQ ID NO: 54130 - protein, 10 aa, Artificial Sequence
  Description of Artificial Sequence: Synthetic epitope
VVSVSSKQGL

SEQ ID NO: 54131 - protein, 10 aa, Artificial Sequence
  Description of Artificial Sequence: Synthetic epitope
VVTASVAALP

SEQ ID NO: 54132 - protein, 10 aa, Artificial Sequence
  Description of Artificial Sequence: Synthetic epitope
VVTESSTSPY

SEQ ID NO: 54133 - protein, 10 aa, Artificial Sequence
  Description of Artificial Sequence: Synthetic epitope
VVTISDEPDI

SEQ ID NO: 54134 - protein, 10 aa, Artificial Sequence
  Description of Artificial Sequence: Synthetic epitope
VVTISWAKSI

SEQ ID NO: 54135 - protein, 10 aa, Artificial Sequence
  Description of Artificial Sequence: Synthetic epitope
VVTNKQAAPG

SEQ ID NO: 54136 - protein, 10 aa, Artificial Sequence
  Description of Artificial Sequence: Synthetic epitope
VVTPVLASTT

SEQ ID NO: 54137 - protein, 10 aa, Artificial Sequence
  Description of Artificial Sequence: Synthetic epitope
VVTSNKRATQ

SEQ ID NO: 54138 - protein, 10 aa, Artificial Sequence
  Description of Artificial Sequence: Synthetic epitope
VVTSRSEDDE

SEQ ID NO: 54139 - protein, 10 aa, Artificial Sequence
  Description of Artificial Sequence: Synthetic epitope
VWESDTRGRA

SEQ ID NO: 54140 - protein, 10 aa, Artificial Sequence
  Description of Artificial Sequence: Synthetic epitope
VWFRSAVVKE

SEQ ID NO: 54141 - protein, 10 aa, Artificial Sequence
  Description of Artificial Sequence: Synthetic epitope
VWGAKQISAT

SEQ ID NO: 54142 - protein, 10 aa, Artificial Sequence
  Description of Artificial Sequence: Synthetic epitope
VWGAQAGLVV

SEQ ID NO: 54143 - protein, 10 aa, Artificial Sequence
  Description of Artificial Sequence: Synthetic epitope
VWKLGMSETR

SEQ ID NO: 54144 - protein, 10 aa, Artificial Sequence
  Description of Artificial Sequence: Synthetic epitope
VWKPNHPERE

SEQ ID NO: 54145 - protein, 10 aa, Artificial Sequence
  Description of Artificial Sequence: Synthetic epitope
VWKTLNVMTD

SEQ ID NO: 54146 - protein, 10 aa, Artificial Sequence
  Description of Artificial Sequence: Synthetic epitope
VWLRTDKDWK

SEQ ID NO: 54147 - protein, 10 aa, Artificial Sequence
  Description of Artificial Sequence: Synthetic epitope
VWNNSSTVNA

SEQ ID NO: 54148 - protein, 10 aa, Artificial Sequence
  Description of Artificial Sequence: Synthetic epitope
VWQAQLGEAS

SEQ ID NO: 54149 - protein, 10 aa, Artificial Sequence
  Description of Artificial Sequence: Synthetic epitope
VYANIERQPR

SEQ ID NO: 54150 - protein, 10 aa, Artificial Sequence
  Description of Artificial Sequence: Synthetic epitope
VYAPSASTAD

SEQ ID NO: 54151 - protein, 10 aa, Artificial Sequence
  Description of Artificial Sequence: Synthetic epitope
VYASAADKMK

SEQ ID NO: 54152 - protein, 10 aa, Artificial Sequence
  Description of Artificial Sequence: Synthetic epitope
VYDNASIAEQ

SEQ ID NO: 54153 - protein, 10 aa, Artificial Sequence
  Description of Artificial Sequence: Synthetic epitope
VYEDRVQIVK

SEQ ID NO: 54154 - protein, 10 aa, Artificial Sequence
  Description of Artificial Sequence: Synthetic epitope
VYEGVEAKRI

SEQ ID NO: 54155 - protein, 10 aa, Artificial Sequence
  Description of Artificial Sequence: Synthetic epitope
VYHAWKSKNK

SEQ ID NO: 54156 - protein, 10 aa, Artificial Sequence
  Description of Artificial Sequence: Synthetic epitope
VYHFDKSTSS

SEQ ID NO: 54157 - protein, 10 aa, Artificial Sequence
  Description of Artificial Sequence: Synthetic epitope
VYILTKVSDI

SEQ ID NO: 54158 - protein, 10 aa, Artificial Sequence
  Description of Artificial Sequence: Synthetic epitope
VYKAVVSSDK

SEQ ID NO: 54159 - protein, 10 aa, Artificial Sequence
  Description of Artificial Sequence: Synthetic epitope
VYKLVINLEE

SEQ ID NO: 54160 - protein, 10 aa, Artificial Sequence
  Description of Artificial Sequence: Synthetic epitope
VYLKTALGLQ

SEQ ID NO: 54161 - protein, 10 aa, Artificial Sequence
  Description of Artificial Sequence: Synthetic epitope
VYLTERKKNK

SEQ ID NO: 54162 - protein, 10 aa, Artificial Sequence
  Description of Artificial Sequence: Synthetic epitope
VYNSRLVSPS

SEQ ID NO: 54163 - protein, 10 aa, Artificial Sequence
  Description of Artificial Sequence: Synthetic epitope
VYNTAGEKWD

SEQ ID NO: 54164 - protein, 10 aa, Artificial Sequence
  Description of Artificial Sequence: Synthetic epitope
VYNWRTVINS

SEQ ID NO: 54165 - protein, 10 aa, Artificial Sequence
  Description of Artificial Sequence: Synthetic epitope
VYQADVQDNG

SEQ ID NO: 54166 - protein, 10 aa, Artificial Sequence
  Description of Artificial Sequence: Synthetic epitope
VYQDTWMKYE

SEQ ID NO: 54167 - protein, 10 aa, Artificial Sequence
  Description of Artificial Sequence: Synthetic epitope
VYQKIILKFP

SEQ ID NO: 54168 - protein, 10 aa, Artificial Sequence
  Description of Artificial Sequence: Synthetic epitope
VYQYSNSRSP

SEQ ID NO: 54169 - protein, 10 aa, Artificial Sequence
  Description of Artificial Sequence: Synthetic epitope
VYRLELGFKH

SEQ ID NO: 54170 - protein, 10 aa, Artificial Sequence
  Description of Artificial Sequence: Synthetic epitope
VYSDSQSSQQ

SEQ ID NO: 54171 - protein, 10 aa, Artificial Sequence
  Description of Artificial Sequence: Synthetic epitope
VYSENLLMVA

SEQ ID NO: 54172 - protein, 10 aa, Artificial Sequence
  Description of Artificial Sequence: Synthetic epitope
VYSISERLEM

SEQ ID NO: 54173 - protein, 10 aa, Artificial Sequence
  Description of Artificial Sequence: Synthetic epitope
VYSTTASTAN

SEQ ID NO: 54174 - protein, 10 aa, Artificial Sequence
  Description of Artificial Sequence: Synthetic epitope
VYSVAKTDSF

SEQ ID NO: 54175 - protein, 10 aa, Artificial Sequence
  Description of Artificial Sequence: Synthetic epitope
VYTYLHEKYL

SEQ ID NO: 54176 - protein, 10 aa, Artificial Sequence
  Description of Artificial Sequence: Synthetic epitope
VYVKHFQEVA

SEQ ID NO: 54177 - protein, 10 aa, Artificial Sequence
  Description of Artificial Sequence: Synthetic epitope
WAFILSLASQ

SEQ ID NO: 54178 - protein, 10 aa, Artificial Sequence
  Description of Artificial Sequence: Synthetic epitope
WAIKNEDIKP

SEQ ID NO: 54179 - protein, 10 aa, Artificial Sequence
  Description of Artificial Sequence: Synthetic epitope
WASRQEPSQG

SEQ ID NO: 54180 - protein, 10 aa, Artificial Sequence
  Description of Artificial Sequence: Synthetic epitope
WASRQEPSQG

SEQ ID NO: 54181 - protein, 10 aa, Artificial Sequence
  Description of Artificial Sequence: Synthetic epitope
WASSLKMDPA

SEQ ID NO: 54182 - protein, 10 aa, Artificial Sequence
  Description of Artificial Sequence: Synthetic epitope
WATLLESIRQ

SEQ ID NO: 54183 - protein, 10 aa, Artificial Sequence
  Description of Artificial Sequence: Synthetic epitope
WATLLESIRQ

SEQ ID NO: 54184 - protein, 10 aa, Artificial Sequence
  Description of Artificial Sequence: Synthetic epitope
WATLLESIRQ

SEQ ID NO: 54185 - protein, 10 aa, Artificial Sequence
  Description of Artificial Sequence: Synthetic epitope
WATQKNEIQA

SEQ ID NO: 54186 - protein, 10 aa, Artificial Sequence
  Description of Artificial Sequence: Synthetic epitope
WDADQTEANN

SEQ ID NO: 54187 - protein, 10 aa, Artificial Sequence
  Description of Artificial Sequence: Synthetic epitope
WDEESAQLLP

SEQ ID NO: 54188 - protein, 10 aa, Artificial Sequence
  Description of Artificial Sequence: Synthetic epitope
WDHKAKGHFN

SEQ ID NO: 54189 - protein, 10 aa, Artificial Sequence
  Description of Artificial Sequence: Synthetic epitope
WDLLSDLEAK

SEQ ID NO: 54190 - protein, 10 aa, Artificial Sequence
  Description of Artificial Sequence: Synthetic epitope
WDQAQHFTNP

SEQ ID NO: 54191 - protein, 10 aa, Artificial Sequence
  Description of Artificial Sequence: Synthetic epitope
WDSRMEGLWK

SEQ ID NO: 54192 - protein, 10 aa, Artificial Sequence
  Description of Artificial Sequence: Synthetic epitope
WEDIWRVNIQ

SEQ ID NO: 54193 - protein, 10 aa, Artificial Sequence
  Description of Artificial Sequence: Synthetic epitope
WEEMVLKKSG

SEQ ID NO: 54194 - protein, 10 aa, Artificial Sequence
  Description of Artificial Sequence: Synthetic epitope
WEENAQLQDA

SEQ ID NO: 54195 - protein, 10 aa, Artificial Sequence
  Description of Artificial Sequence: Synthetic epitope
WEENKSLQQV

SEQ ID NO: 54196 - protein, 10 aa, Artificial Sequence
  Description of Artificial Sequence: Synthetic epitope
WEIHSFYLHA

SEQ ID NO: 54197 - protein, 10 aa, Artificial Sequence
  Description of Artificial Sequence: Synthetic epitope
WERDEAQVRE

SEQ ID NO: 54198 - protein, 10 aa, Artificial Sequence
  Description of Artificial Sequence: Synthetic epitope
WESQQDVSQT

SEQ ID NO: 54199 - protein, 10 aa, Artificial Sequence
  Description of Artificial Sequence: Synthetic epitope
WETRVKKHKA

SEQ ID NO: 54200 - protein, 10 aa, Artificial Sequence
  Description of Artificial Sequence: Synthetic epitope
WEVLPQLSKE

SEQ ID NO: 54201 - protein, 10 aa, Artificial Sequence
  Description of Artificial Sequence: Synthetic epitope
WFEYTVTRAE

SEQ ID NO: 54202 - protein, 10 aa, Artificial Sequence
  Description of Artificial Sequence: Synthetic epitope
WGKNVSSTES

SEQ ID NO: 54203 - protein, 10 aa, Artificial Sequence
  Description of Artificial Sequence: Synthetic epitope
WGLADVRELH

SEQ ID NO: 54204 - protein, 10 aa, Artificial Sequence
  Description of Artificial Sequence: Synthetic epitope
WGNSTVASTA

SEQ ID NO: 54205 - protein, 10 aa, Artificial Sequence
  Description of Artificial Sequence: Synthetic epitope
WHKNKAGIEA

SEQ ID NO: 54206 - protein, 10 aa, Artificial Sequence
  Description of Artificial Sequence: Synthetic epitope
WHLWYTNAAP

SEQ ID NO: 54207 - protein, 10 aa, Artificial Sequence
  Description of Artificial Sequence: Synthetic epitope
WHPLRAKAEK

SEQ ID NO: 54208 - protein, 10 aa, Artificial Sequence
  Description of Artificial Sequence: Synthetic epitope
WIDADKTITE

SEQ ID NO: 54209 - protein, 10 aa, Artificial Sequence
  Description of Artificial Sequence: Synthetic epitope
WIDIKRMDDP

SEQ ID NO: 54210 - protein, 10 aa, Artificial Sequence
  Description of Artificial Sequence: Synthetic epitope
WKEQSAVVLA

SEQ ID NO: 54211 - protein, 10 aa, Artificial Sequence
  Description of Artificial Sequence: Synthetic epitope
WKHTSSLKVA

SEQ ID NO: 54212 - protein, 10 aa, Artificial Sequence
  Description of Artificial Sequence: Synthetic epitope
WKIINAFRYY

SEQ ID NO: 54213 - protein, 10 aa, Artificial Sequence
  Description of Artificial Sequence: Synthetic epitope
WKKIMRLGRK

SEQ ID NO: 54214 - protein, 10 aa, Artificial Sequence
  Description of Artificial Sequence: Synthetic epitope
WKKISAIIEK

SEQ ID NO: 54215 - protein, 10 aa, Artificial Sequence
  Description of Artificial Sequence: Synthetic epitope
WKKLTNAQRS

SEQ ID NO: 54216 - protein, 10 aa, Artificial Sequence
  Description of Artificial Sequence: Synthetic epitope
WKLSSISEKS

SEQ ID NO: 54217 - protein, 10 aa, Artificial Sequence
  Description of Artificial Sequence: Synthetic epitope
WKMYHSRMQR

SEQ ID NO: 54218 - protein, 10 aa, Artificial Sequence
  Description of Artificial Sequence: Synthetic epitope
WKNANQQKQD

SEQ ID NO: 54219 - protein, 10 aa, Artificial Sequence
  Description of Artificial Sequence: Synthetic epitope
WKPGQFVFKG

SEQ ID NO: 54220 - protein, 10 aa, Artificial Sequence
  Description of Artificial Sequence: Synthetic epitope
WKRQAEEYAN

SEQ ID NO: 54221 - protein, 10 aa, Artificial Sequence
  Description of Artificial Sequence: Synthetic epitope
WKRQTAVGLE

SEQ ID NO: 54222 - protein, 10 aa, Artificial Sequence
  Description of Artificial Sequence: Synthetic epitope
WKTDASDVKP

SEQ ID NO: 54223 - protein, 10 aa, Artificial Sequence
  Description of Artificial Sequence: Synthetic epitope
WKTRKDTQWP

SEQ ID NO: 54224 - protein, 10 aa, Artificial Sequence
  Description of Artificial Sequence: Synthetic epitope
WKVNRDKTID

SEQ ID NO: 54225 - protein, 10 aa, Artificial Sequence
  Description of Artificial Sequence: Synthetic epitope
WKWQYPVQIR

SEQ ID NO: 54226 - protein, 10 aa, Artificial Sequence
  Description of Artificial Sequence: Synthetic epitope
WLEAVASSVA

SEQ ID NO: 54227 - protein, 10 aa, Artificial Sequence
  Description of Artificial Sequence: Synthetic epitope
WLKELKSKKR

SEQ ID NO: 54228 - protein, 10 aa, Artificial Sequence
  Description of Artificial Sequence: Synthetic epitope
WLLEEVSKSS

SEQ ID NO: 54229 - protein, 10 aa, Artificial Sequence
  Description of Artificial Sequence: Synthetic epitope
WLMDAEMYTN

SEQ ID NO: 54230 - protein, 10 aa, Artificial Sequence
  Description of Artificial Sequence: Synthetic epitope
WLSVQTAAPS

SEQ ID NO: 54231 - protein, 10 aa, Artificial Sequence
  Description of Artificial Sequence: Synthetic epitope
WLVMEKSSPE

SEQ ID NO: 54232 - protein, 10 aa, Artificial Sequence
  Description of Artificial Sequence: Synthetic epitope
WLWFATVKSL

SEQ ID NO: 54233 - protein, 10 aa, Artificial Sequence
  Description of Artificial Sequence: Synthetic epitope
WMDGIASQIG

SEQ ID NO: 54234 - protein, 10 aa, Artificial Sequence
  Description of Artificial Sequence: Synthetic epitope
WMKFNSLLKV

SEQ ID NO: 54235 - protein, 10 aa, Artificial Sequence
  Description of Artificial Sequence: Synthetic epitope
WMKKELVSEH

SEQ ID NO: 54236 - protein, 10 aa, Artificial Sequence
  Description of Artificial Sequence: Synthetic epitope
WMKMRRIKPA

SEQ ID NO: 54237 - protein, 10 aa, Artificial Sequence
  Description of Artificial Sequence: Synthetic epitope
WMKSAEIRRS

SEQ ID NO: 54238 - protein, 10 aa, Artificial Sequence
  Description of Artificial Sequence: Synthetic epitope
WMTRQASRES

SEQ ID NO: 54239 - protein, 10 aa, Artificial Sequence
  Description of Artificial Sequence: Synthetic epitope
WNEMIMFELP

SEQ ID NO: 54240 - protein, 10 aa, Artificial Sequence
  Description of Artificial Sequence: Synthetic epitope
WNMTVSMTSD

SEQ ID NO: 54241 - protein, 10 aa, Artificial Sequence
  Description of Artificial Sequence: Synthetic epitope
WNSIVSSGGD

SEQ ID NO: 54242 - protein, 10 aa, Artificial Sequence
  Description of Artificial Sequence: Synthetic epitope
WPEVKTTASD

SEQ ID NO: 54243 - protein, 10 aa, Artificial Sequence
  Description of Artificial Sequence: Synthetic epitope
WPHSVNSSPE

SEQ ID NO: 54244 - protein, 10 aa, Artificial Sequence
  Description of Artificial Sequence: Synthetic epitope
WPKTEPLEME

SEQ ID NO: 54245 - protein, 10 aa, Artificial Sequence
  Description of Artificial Sequence: Synthetic epitope
WPMNFGWRTI

SEQ ID NO: 54246 - protein, 10 aa, Artificial Sequence
  Description of Artificial Sequence: Synthetic epitope
WPRLKPKALA

SEQ ID NO: 54247 - protein, 10 aa, Artificial Sequence
  Description of Artificial Sequence: Synthetic epitope
WPTVTSRTPA

SEQ ID NO: 54248 - protein, 10 aa, Artificial Sequence
  Description of Artificial Sequence: Synthetic epitope
WPVDRLWTAG

SEQ ID NO: 54249 - protein, 10 aa, Artificial Sequence
  Description of Artificial Sequence: Synthetic epitope
WPVTEFAEAG

SEQ ID NO: 54250 - protein, 10 aa, Artificial Sequence
  Description of Artificial Sequence: Synthetic epitope
WQDMKIKFMY

SEQ ID NO: 54251 - protein, 10 aa, Artificial Sequence
  Description of Artificial Sequence: Synthetic epitope
WQGQQVQARK

SEQ ID NO: 54252 - protein, 10 aa, Artificial Sequence
  Description of Artificial Sequence: Synthetic epitope
WQIVITNSNT

SEQ ID NO: 54253 - protein, 10 aa, Artificial Sequence
  Description of Artificial Sequence: Synthetic epitope
WQKAKREQGL

SEQ ID NO: 54254 - protein, 10 aa, Artificial Sequence
  Description of Artificial Sequence: Synthetic epitope
WQKQKGGVRR

SEQ ID NO: 54255 - protein, 10 aa, Artificial Sequence
  Description of Artificial Sequence: Synthetic epitope
WQLETSITKP

SEQ ID NO: 54256 - protein, 10 aa, Artificial Sequence
  Description of Artificial Sequence: Synthetic epitope
WQLSALAEQQ

SEQ ID NO: 54257 - protein, 10 aa, Artificial Sequence
  Description of Artificial Sequence: Synthetic epitope
WQPDKMLHLV

SEQ ID NO: 54258 - protein, 10 aa, Artificial Sequence
  Description of Artificial Sequence: Synthetic epitope
WQQFNILDSM

SEQ ID NO: 54259 - protein, 10 aa, Artificial Sequence
  Description of Artificial Sequence: Synthetic epitope
WQSAGISKEL

SEQ ID NO: 54260 - protein, 10 aa, Artificial Sequence
  Description of Artificial Sequence: Synthetic epitope
WQVIIGARAE

SEQ ID NO: 54261 - protein, 10 aa, Artificial Sequence
  Description of Artificial Sequence: Synthetic epitope
WRDMTTITED

SEQ ID NO: 54262 - protein, 10 aa, Artificial Sequence
  Description of Artificial Sequence: Synthetic epitope
WRDVSELLKP

SEQ ID NO: 54263 - protein, 10 aa, Artificial Sequence
  Description of Artificial Sequence: Synthetic epitope
WRFSSAARDD

SEQ ID NO: 54264 - protein, 10 aa, Artificial Sequence
  Description of Artificial Sequence: Synthetic epitope
WRKAASLKSN

SEQ ID NO: 54265 - protein, 10 aa, Artificial Sequence
  Description of Artificial Sequence: Synthetic epitope
WRKSQQAERE

SEQ ID NO: 54266 - protein, 10 aa, Artificial Sequence
  Description of Artificial Sequence: Synthetic epitope
WRLANQQSLK

SEQ ID NO: 54267 - protein, 10 aa, Artificial Sequence
  Description of Artificial Sequence: Synthetic epitope
WRLDAIGEHE

SEQ ID NO: 54268 - protein, 10 aa, Artificial Sequence
  Description of Artificial Sequence: Synthetic epitope
WRMMKYQQKA

SEQ ID NO: 54269 - protein, 10 aa, Artificial Sequence
  Description of Artificial Sequence: Synthetic epitope
WSDMSGDSSA

SEQ ID NO: 54270 - protein, 10 aa, Artificial Sequence
  Description of Artificial Sequence: Synthetic epitope
WSKERAGLLQ

SEQ ID NO: 54271 - protein, 10 aa, Artificial Sequence
  Description of Artificial Sequence: Synthetic epitope
WSKQRTKERE

SEQ ID NO: 54272 - protein, 10 aa, Artificial Sequence
  Description of Artificial Sequence: Synthetic epitope
WSRMVKSLNV

SEQ ID NO: 54273 - protein, 10 aa, Artificial Sequence
  Description of Artificial Sequence: Synthetic epitope
WTPARGVSFV

SEQ ID NO: 54274 - protein, 10 aa, Artificial Sequence
  Description of Artificial Sequence: Synthetic epitope
WTREKVQDIE

SEQ ID NO: 54275 - protein, 10 aa, Artificial Sequence
  Description of Artificial Sequence: Synthetic epitope
WTRLRAVAQD

SEQ ID NO: 54276 - protein, 10 aa, Artificial Sequence
  Description of Artificial Sequence: Synthetic epitope
WTRQLTVESD

SEQ ID NO: 54277 - protein, 10 aa, Artificial Sequence
  Description of Artificial Sequence: Synthetic epitope
WTSPLKVTPL

SEQ ID NO: 54278 - protein, 10 aa, Artificial Sequence
  Description of Artificial Sequence: Synthetic epitope
WVEKSSNYEN

SEQ ID NO: 54279 - protein, 10 aa, Artificial Sequence
  Description of Artificial Sequence: Synthetic epitope
WVESIVVLNL

SEQ ID NO: 54280 - protein, 10 aa, Artificial Sequence
  Description of Artificial Sequence: Synthetic epitope
WVINGLLEAK

SEQ ID NO: 54281 - protein, 10 aa, Artificial Sequence
  Description of Artificial Sequence: Synthetic epitope
WVKHRMYTFS

SEQ ID NO: 54282 - protein, 10 aa, Artificial Sequence
  Description of Artificial Sequence: Synthetic epitope
WVMKMLQMDM

SEQ ID NO: 54283 - protein, 10 aa, Artificial Sequence
  Description of Artificial Sequence: Synthetic epitope
WVPHTFESEL

SEQ ID NO: 54284 - protein, 10 aa, Artificial Sequence
  Description of Artificial Sequence: Synthetic epitope
WVRTDMAGPK

SEQ ID NO: 54285 - protein, 10 aa, Artificial Sequence
  Description of Artificial Sequence: Synthetic epitope
WWDTEFAFEV

SEQ ID NO: 54286 - protein, 10 aa, Artificial Sequence
  Description of Artificial Sequence: Synthetic epitope
WWMQGLLRNM

SEQ ID NO: 54287 - protein, 10 aa, Artificial Sequence
  Description of Artificial Sequence: Synthetic epitope
WWPEFSVNKP

SEQ ID NO: 54288 - protein, 10 aa, Artificial Sequence
  Description of Artificial Sequence: Synthetic epitope
WYLAKLIRGM

SEQ ID NO: 54289 - protein, 10 aa, Artificial Sequence
  Description of Artificial Sequence: Synthetic epitope
WYLNRLRIVN

SEQ ID NO: 54290 - protein, 10 aa, Artificial Sequence
  Description of Artificial Sequence: Synthetic epitope
WYNTSVMRKV

SEQ ID NO: 54291 - protein, 10 aa, Artificial Sequence
  Description of Artificial Sequence: Synthetic epitope
WYQTRAEEIE

SEQ ID NO: 54292 - protein, 10 aa, Artificial Sequence
  Description of Artificial Sequence: Synthetic epitope
WYSVTASVVT

SEQ ID NO: 54293 - protein, 10 aa, Artificial Sequence
  Description of Artificial Sequence: Synthetic epitope
  MOD_RES (1)..(2): Any amino acid
XXFTSSTSLL

SEQ ID NO: 54294 - protein, 10 aa, Artificial Sequence
  Description of Artificial Sequence: Synthetic epitope
  MOD_RES (1)..(2): Any amino acid
XXITITETTS

SEQ ID NO: 54295 - protein, 10 aa, Artificial Sequence
  Description of Artificial Sequence: Synthetic epitope
YAAKMISESG

SEQ ID NO: 54296 - protein, 10 aa, Artificial Sequence
  Description of Artificial Sequence: Synthetic epitope
YAALSIEQQR

SEQ ID NO: 54297 - protein, 10 aa, Artificial Sequence
  Description of Artificial Sequence: Synthetic epitope
YAATKTKYRK

SEQ ID NO: 54298 - protein, 10 aa, Artificial Sequence
  Description of Artificial Sequence: Synthetic epitope
YAAVAGIRVE

SEQ ID NO: 54299 - protein, 10 aa, Artificial Sequence
  Description of Artificial Sequence: Synthetic epitope
YAAVEAKKER

SEQ ID NO: 54300 - protein, 10 aa, Artificial Sequence
  Description of Artificial Sequence: Synthetic epitope
YADLASPVSS

SEQ ID NO: 54301 - protein, 10 aa, Artificial Sequence
  Description of Artificial Sequence: Synthetic epitope
YAEVVTEEQR

SEQ ID NO: 54302 - protein, 10 aa, Artificial Sequence
  Description of Artificial Sequence: Synthetic epitope
YAFSQLRSTQ

SEQ ID NO: 54303 - protein, 10 aa, Artificial Sequence
  Description of Artificial Sequence: Synthetic epitope
YAGAPKKAEG

SEQ ID NO: 54304 - protein, 10 aa, Artificial Sequence
  Description of Artificial Sequence: Synthetic epitope
YAGAPKKAEG

SEQ ID NO: 54305 - protein, 10 aa, Artificial Sequence
  Description of Artificial Sequence: Synthetic epitope
YAGRQASQTE

SEQ ID NO: 54306 - protein, 10 aa, Artificial Sequence
  Description of Artificial Sequence: Synthetic epitope
YAHELQFEYP

SEQ ID NO: 54307 - protein, 10 aa, Artificial Sequence
  Description of Artificial Sequence: Synthetic epitope
YAIISTSPSN

SEQ ID NO: 54308 - protein, 10 aa, Artificial Sequence
  Description of Artificial Sequence: Synthetic epitope
YAIQEIQAEE

SEQ ID NO: 54309 - protein, 10 aa, Artificial Sequence
  Description of Artificial Sequence: Synthetic epitope
YAKEAQQSLR

SEQ ID NO: 54310 - protein, 10 aa, Artificial Sequence
  Description of Artificial Sequence: Synthetic epitope
YAKGKNMAMM

SEQ ID NO: 54311 - protein, 10 aa, Artificial Sequence
  Description of Artificial Sequence: Synthetic epitope
YAKLQAVKAE

SEQ ID NO: 54312 - protein, 10 aa, Artificial Sequence
  Description of Artificial Sequence: Synthetic epitope
YAKSISLIER

SEQ ID NO: 54313 - protein, 10 aa, Artificial Sequence
  Description of Artificial Sequence: Synthetic epitope
YAKYKLHGFQ

SEQ ID NO: 54314 - protein, 10 aa, Artificial Sequence
  Description of Artificial Sequence: Synthetic epitope
YANVASLVAF

SEQ ID NO: 54315 - protein, 10 aa, Artificial Sequence
  Description of Artificial Sequence: Synthetic epitope
YAPEATDYDV

SEQ ID NO: 54316 - protein, 10 aa, Artificial Sequence
  Description of Artificial Sequence: Synthetic epitope
YAPRIFFEAS

SEQ ID NO: 54317 - protein, 10 aa, Artificial Sequence
  Description of Artificial Sequence: Synthetic epitope
YAPSTTLSSP

SEQ ID NO: 54318 - protein, 10 aa, Artificial Sequence
  Description of Artificial Sequence: Synthetic epitope
YAPTAAVESM

SEQ ID NO: 54319 - protein, 10 aa, Artificial Sequence
  Description of Artificial Sequence: Synthetic epitope
YAQAEKVDRK

SEQ ID NO: 54320 - protein, 10 aa, Artificial Sequence
  Description of Artificial Sequence: Synthetic epitope
YAQDKETQEK

SEQ ID NO: 54321 - protein, 10 aa, Artificial Sequence
  Description of Artificial Sequence: Synthetic epitope
YAQLSKSSVL

SEQ ID NO: 54322 - protein, 10 aa, Artificial Sequence
  Description of Artificial Sequence: Synthetic epitope
YAQNAKVIEK

SEQ ID NO: 54323 - protein, 10 aa, Artificial Sequence
  Description of Artificial Sequence: Synthetic epitope
YARDQSNNEI

SEQ ID NO: 54324 - protein, 10 aa, Artificial Sequence
  Description of Artificial Sequence: Synthetic epitope
YAREALIEID

SEQ ID NO: 54325 - protein, 10 aa, Artificial Sequence
  Description of Artificial Sequence: Synthetic epitope
YAREVATPLF

SEQ ID NO: 54326 - protein, 10 aa, Artificial Sequence
  Description of Artificial Sequence: Synthetic epitope
YARFESPPKT

SEQ ID NO: 54327 - protein, 10 aa, Artificial Sequence
  Description of Artificial Sequence: Synthetic epitope
YARVSDRDLW

SEQ ID NO: 54328 - protein, 10 aa, Artificial Sequence
  Description of Artificial Sequence: Synthetic epitope
YASAEADSSA

SEQ ID NO: 54329 - protein, 10 aa, Artificial Sequence
  Description of Artificial Sequence: Synthetic epitope
YASLKFSESL

SEQ ID NO: 54330 - protein, 10 aa, Artificial Sequence
  Description of Artificial Sequence: Synthetic epitope
YASQREAASG

SEQ ID NO: 54331 - protein, 10 aa, Artificial Sequence
  Description of Artificial Sequence: Synthetic epitope
YASRNSSQLT

SEQ ID NO: 54332 - protein, 10 aa, Artificial Sequence
  Description of Artificial Sequence: Synthetic epitope
YASRNSSQLT

SEQ ID NO: 54333 - protein, 10 aa, Artificial Sequence
  Description of Artificial Sequence: Synthetic epitope
YASSNAAERT

SEQ ID NO: 54334 - protein, 10 aa, Artificial Sequence
  Description of Artificial Sequence: Synthetic epitope
YASSRLLETL

SEQ ID NO: 54335 - protein, 10 aa, Artificial Sequence
  Description of Artificial Sequence: Synthetic epitope
YAVFTDYEHD

SEQ ID NO: 54336 - protein, 10 aa, Artificial Sequence
  Description of Artificial Sequence: Synthetic epitope
YAVKTVLQRP

SEQ ID NO: 54337 - protein, 10 aa, Artificial Sequence
  Description of Artificial Sequence: Synthetic epitope
YAWANSEISQ

SEQ ID NO: 54338 - protein, 10 aa, Artificial Sequence
  Description of Artificial Sequence: Synthetic epitope
YDAKIEIQTL

SEQ ID NO: 54339 - protein, 10 aa, Artificial Sequence
  Description of Artificial Sequence: Synthetic epitope
YDAKSSAKIL

SEQ ID NO: 54340 - protein, 10 aa, Artificial Sequence
  Description of Artificial Sequence: Synthetic epitope
YDANINHAAD

SEQ ID NO: 54341 - protein, 10 aa, Artificial Sequence
  Description of Artificial Sequence: Synthetic epitope
YDHAMLRFKA

SEQ ID NO: 54342 - protein, 10 aa, Artificial Sequence
  Description of Artificial Sequence: Synthetic epitope
YDHTLVTEPN

SEQ ID NO: 54343 - protein, 10 aa, Artificial Sequence
  Description of Artificial Sequence: Synthetic epitope
YDKKSTNTSE

SEQ ID NO: 54344 - protein, 10 aa, Artificial Sequence
  Description of Artificial Sequence: Synthetic epitope
YDKMKLKGSS

SEQ ID NO: 54345 - protein, 10 aa, Artificial Sequence
  Description of Artificial Sequence: Synthetic epitope
YDLLRAASEN

SEQ ID NO: 54346 - protein, 10 aa, Artificial Sequence
  Description of Artificial Sequence: Synthetic epitope
YDLSKVVLAG

SEQ ID NO: 54347 - protein, 10 aa, Artificial Sequence
  Description of Artificial Sequence: Synthetic epitope
YDLVLMENVE

SEQ ID NO: 54348 - protein, 10 aa, Artificial Sequence
  Description of Artificial Sequence: Synthetic epitope
YDNFEIEEYP

SEQ ID NO: 54349 - protein, 10 aa, Artificial Sequence
  Description of Artificial Sequence: Synthetic epitope
YDNREIVMKY

SEQ ID NO: 54350 - protein, 10 aa, Artificial Sequence
  Description of Artificial Sequence: Synthetic epitope
YDPEMEEDSY

SEQ ID NO: 54351 - protein, 10 aa, Artificial Sequence
  Description of Artificial Sequence: Synthetic epitope
YDQAIRNDET

SEQ ID NO: 54352 - protein, 10 aa, Artificial Sequence
  Description of Artificial Sequence: Synthetic epitope
YDQEQFADNQ

SEQ ID NO: 54353 - protein, 10 aa, Artificial Sequence
  Description of Artificial Sequence: Synthetic epitope
YDQRTEFSFT

SEQ ID NO: 54354 - protein, 10 aa, Artificial Sequence
  Description of Artificial Sequence: Synthetic epitope
YDQTGKEVAD

SEQ ID NO: 54355 - protein, 10 aa, Artificial Sequence
  Description of Artificial Sequence: Synthetic epitope
YDRHFTQPHA

SEQ ID NO: 54356 - protein, 10 aa, Artificial Sequence
  Description of Artificial Sequence: Synthetic epitope
YDSAVKVSSA

SEQ ID NO: 54357 - protein, 10 aa, Artificial Sequence
  Description of Artificial Sequence: Synthetic epitope
YDTAWKKHDL

SEQ ID NO: 54358 - protein, 10 aa, Artificial Sequence
  Description of Artificial Sequence: Synthetic epitope
YDTDVKLFEI

SEQ ID NO: 54359 - protein, 10 aa, Artificial Sequence
  Description of Artificial Sequence: Synthetic epitope
YDVAAEGEDE

SEQ ID NO: 54360 - protein, 10 aa, Artificial Sequence
  Description of Artificial Sequence: Synthetic epitope
YDVTASGSGS

SEQ ID NO: 54361 - protein, 10 aa, Artificial Sequence
  Description of Artificial Sequence: Synthetic epitope
YDVTDVSNVH

SEQ ID NO: 54362 - protein, 10 aa, Artificial Sequence
  Description of Artificial Sequence: Synthetic epitope
YDVVEMSNLA

SEQ ID NO: 54363 - protein, 10 aa, Artificial Sequence
  Description of Artificial Sequence: Synthetic epitope
YDWSHIRDEL

SEQ ID NO: 54364 - protein, 10 aa, Artificial Sequence
  Description of Artificial Sequence: Synthetic epitope
YDYLKSTTLD

SEQ ID NO: 54365 - protein, 10 aa, Artificial Sequence
  Description of Artificial Sequence: Synthetic epitope
YEATSVQQKV

SEQ ID NO: 54366 - protein, 10 aa, Artificial Sequence
  Description of Artificial Sequence: Synthetic epitope
YEELNTATFK

SEQ ID NO: 54367 - protein, 10 aa, Artificial Sequence
  Description of Artificial Sequence: Synthetic epitope
YEESKVSKYA

SEQ ID NO: 54368 - protein, 10 aa, Artificial Sequence
  Description of Artificial Sequence: Synthetic epitope
YEESSDLQMD

SEQ ID NO: 54369 - protein, 10 aa, Artificial Sequence
  Description of Artificial Sequence: Synthetic epitope
YEETAKLAVG

SEQ ID NO: 54370 - protein, 10 aa, Artificial Sequence
  Description of Artificial Sequence: Synthetic epitope
YEFEFAAQQF

SEQ ID NO: 54371 - protein, 10 aa, Artificial Sequence
  Description of Artificial Sequence: Synthetic epitope
YEFSIRLEKA

SEQ ID NO: 54372 - protein, 10 aa, Artificial Sequence
  Description of Artificial Sequence: Synthetic epitope
YEGKENVSFE

SEQ ID NO: 54373 - protein, 10 aa, Artificial Sequence
  Description of Artificial Sequence: Synthetic epitope
YEHKEIEYVE

SEQ ID NO: 54374 - protein, 10 aa, Artificial Sequence
  Description of Artificial Sequence: Synthetic epitope
YEIAATVSLT

SEQ ID NO: 54375 - protein, 10 aa, Artificial Sequence
  Description of Artificial Sequence: Synthetic epitope
YEKASMALDV

SEQ ID NO: 54376 - protein, 10 aa, Artificial Sequence
  Description of Artificial Sequence: Synthetic epitope
YEKIKIQQSV

SEQ ID NO: 54377 - protein, 10 aa, Artificial Sequence
  Description of Artificial Sequence: Synthetic epitope
YEKSVSSLSA

SEQ ID NO: 54378 - protein, 10 aa, Artificial Sequence
  Description of Artificial Sequence: Synthetic epitope
YEKVVDYQEE

SEQ ID NO: 54379 - protein, 10 aa, Artificial Sequence
  Description of Artificial Sequence: Synthetic epitope
YELEITSDSQ

SEQ ID NO: 54380 - protein, 10 aa, Artificial Sequence
  Description of Artificial Sequence: Synthetic epitope
YELVTSSREE

SEQ ID NO: 54381 - protein, 10 aa, Artificial Sequence
  Description of Artificial Sequence: Synthetic epitope
YEMGYKSRSE

SEQ ID NO: 54382 - protein, 10 aa, Artificial Sequence
  Description of Artificial Sequence: Synthetic epitope
YENIKTVTQE

SEQ ID NO: 54383 - protein, 10 aa, Artificial Sequence
  Description of Artificial Sequence: Synthetic epitope
YENINVSANV

SEQ ID NO: 54384 - protein, 10 aa, Artificial Sequence
  Description of Artificial Sequence: Synthetic epitope
YENKVAVRDR

SEQ ID NO: 54385 - protein, 10 aa, Artificial Sequence
  Description of Artificial Sequence: Synthetic epitope
YEPEKMEAED

SEQ ID NO: 54386 - protein, 10 aa, Artificial Sequence
  Description of Artificial Sequence: Synthetic epitope
YERAVLRKDH

SEQ ID NO: 54387 - protein, 10 aa, Artificial Sequence
  Description of Artificial Sequence: Synthetic epitope
YERPEQSVNK

SEQ ID NO: 54388 - protein, 10 aa, Artificial Sequence
  Description of Artificial Sequence: Synthetic epitope
YESIGQYGGE

SEQ ID NO: 54389 - protein, 10 aa, Artificial Sequence
  Description of Artificial Sequence: Synthetic epitope
YESKEKSKEE

SEQ ID NO: 54390 - protein, 10 aa, Artificial Sequence
  Description of Artificial Sequence: Synthetic epitope
YESRRVTDPE

SEQ ID NO: 54391 - protein, 10 aa, Artificial Sequence
  Description of Artificial Sequence: Synthetic epitope
YETETARTPS

SEQ ID NO: 54392 - protein, 10 aa, Artificial Sequence
  Description of Artificial Sequence: Synthetic epitope
YETKEESYSP

SEQ ID NO: 54393 - protein, 10 aa, Artificial Sequence
  Description of Artificial Sequence: Synthetic epitope
YEVDAQRKEA

SEQ ID NO: 54394 - protein, 10 aa, Artificial Sequence
  Description of Artificial Sequence: Synthetic epitope
YEVLQPSDIM

SEQ ID NO: 54395 - protein, 10 aa, Artificial Sequence
  Description of Artificial Sequence: Synthetic epitope
YEWESSILVQ

SEQ ID NO: 54396 - protein, 10 aa, Artificial Sequence
  Description of Artificial Sequence: Synthetic epitope
YEYEDSKQKS

SEQ ID NO: 54397 - protein, 10 aa, Artificial Sequence
  Description of Artificial Sequence: Synthetic epitope
YEYSYQTTIN

SEQ ID NO: 54398 - protein, 10 aa, Artificial Sequence
  Description of Artificial Sequence: Synthetic epitope
YFANLSNKSQ

SEQ ID NO: 54399 - protein, 10 aa, Artificial Sequence
  Description of Artificial Sequence: Synthetic epitope
YFDSDAKIEE

SEQ ID NO: 54400 - protein, 10 aa, Artificial Sequence
  Description of Artificial Sequence: Synthetic epitope
YFKTAVTSKE

SEQ ID NO: 54401 - protein, 10 aa, Artificial Sequence
  Description of Artificial Sequence: Synthetic epitope
YFKTTKTIRQ

SEQ ID NO: 54402 - protein, 10 aa, Artificial Sequence
  Description of Artificial Sequence: Synthetic epitope
YFKYTVAPTS

SEQ ID NO: 54403 - protein, 10 aa, Artificial Sequence
  Description of Artificial Sequence: Synthetic epitope
YFPATSRYAS

SEQ ID NO: 54404 - protein, 10 aa, Artificial Sequence
  Description of Artificial Sequence: Synthetic epitope
YGAIRNDYIV

SEQ ID NO: 54405 - protein, 10 aa, Artificial Sequence
  Description of Artificial Sequence: Synthetic epitope
YGAKNLKGQE

SEQ ID NO: 54406 - protein, 10 aa, Artificial Sequence
  Description of Artificial Sequence: Synthetic epitope
YGASAKKVKS

SEQ ID NO: 54407 - protein, 10 aa, Artificial Sequence
  Description of Artificial Sequence: Synthetic epitope
YGEIGATGDF

SEQ ID NO: 54408 - protein, 10 aa, Artificial Sequence
  Description of Artificial Sequence: Synthetic epitope
YGEKSAAMKK

SEQ ID NO: 54409 - protein, 10 aa, Artificial Sequence
  Description of Artificial Sequence: Synthetic epitope
YGENSNSLSS

SEQ ID NO: 54410 - protein, 10 aa, Artificial Sequence
  Description of Artificial Sequence: Synthetic epitope
YGEQDTYNKA

SEQ ID NO: 54411 - protein, 10 aa, Artificial Sequence
  Description of Artificial Sequence: Synthetic epitope
YGESNLVAEP

SEQ ID NO: 54412 - protein, 10 aa, Artificial Sequence
  Description of Artificial Sequence: Synthetic epitope
YGEWFPSYQV

SEQ ID NO: 54413 - protein, 10 aa, Artificial Sequence
  Description of Artificial Sequence: Synthetic epitope
YGGNLSLQSA

SEQ ID NO: 54414 - protein, 10 aa, Artificial Sequence
  Description of Artificial Sequence: Synthetic epitope
YGKEEHEKEA

SEQ ID NO: 54415 - protein, 10 aa, Artificial Sequence
  Description of Artificial Sequence: Synthetic epitope
YGKEKANKDR

SEQ ID NO: 54416 - protein, 10 aa, Artificial Sequence
  Description of Artificial Sequence: Synthetic epitope
YGKGKSNSSA

SEQ ID NO: 54417 - protein, 10 aa, Artificial Sequence
  Description of Artificial Sequence: Synthetic epitope
YGKRAIAPKV

SEQ ID NO: 54418 - protein, 10 aa, Artificial Sequence
  Description of Artificial Sequence: Synthetic epitope
YGKSEWNTVE

SEQ ID NO: 54419 - protein, 10 aa, Artificial Sequence
  Description of Artificial Sequence: Synthetic epitope
YGKSMSLIEI

SEQ ID NO: 54420 - protein, 10 aa, Artificial Sequence
  Description of Artificial Sequence: Synthetic epitope
YGNAQQIGQY

SEQ ID NO: 54421 - protein, 10 aa, Artificial Sequence
  Description of Artificial Sequence: Synthetic epitope
YGQATELAEH

SEQ ID NO: 54422 - protein, 10 aa, Artificial Sequence
  Description of Artificial Sequence: Synthetic epitope
YGREESAEQV

SEQ ID NO: 54423 - protein, 10 aa, Artificial Sequence
  Description of Artificial Sequence: Synthetic epitope
YGRGVQVNYD

SEQ ID NO: 54424 - protein, 10 aa, Artificial Sequence
  Description of Artificial Sequence: Synthetic epitope
YGSEKKAKKR

SEQ ID NO: 54425 - protein, 10 aa, Artificial Sequence
  Description of Artificial Sequence: Synthetic epitope
YGSNIALSSN

SEQ ID NO: 54426 - protein, 10 aa, Artificial Sequence
  Description of Artificial Sequence: Synthetic epitope
YGTAEFKEPT

SEQ ID NO: 54427 - protein, 10 aa, Artificial Sequence
  Description of Artificial Sequence: Synthetic epitope
YGTGLSLTES

SEQ ID NO: 54428 - protein, 10 aa, Artificial Sequence
  Description of Artificial Sequence: Synthetic epitope
YGTNVAATGI

SEQ ID NO: 54429 - protein, 10 aa, Artificial Sequence
  Description of Artificial Sequence: Synthetic epitope
YHESQARPAE

SEQ ID NO: 54430 - protein, 10 aa, Artificial Sequence
  Description of Artificial Sequence: Synthetic epitope
YHGMSALQKK

SEQ ID NO: 54431 - protein, 10 aa, Artificial Sequence
  Description of Artificial Sequence: Synthetic epitope
YHHIQEIMVQ

SEQ ID NO: 54432 - protein, 10 aa, Artificial Sequence
  Description of Artificial Sequence: Synthetic epitope
YHHLTLVEAI

SEQ ID NO: 54433 - protein, 10 aa, Artificial Sequence
  Description of Artificial Sequence: Synthetic epitope
YHITKIVMED

SEQ ID NO: 54434 - protein, 10 aa, Artificial Sequence
  Description of Artificial Sequence: Synthetic epitope
YHKEQAAQLR

SEQ ID NO: 54435 - protein, 10 aa, Artificial Sequence
  Description of Artificial Sequence: Synthetic epitope
YHLLSIVKAT

SEQ ID NO: 54436 - protein, 10 aa, Artificial Sequence
  Description of Artificial Sequence: Synthetic epitope
YHLRITAEVE

SEQ ID NO: 54437 - protein, 10 aa, Artificial Sequence
  Description of Artificial Sequence: Synthetic epitope
YHPKGARIDV

SEQ ID NO: 54438 - protein, 10 aa, Artificial Sequence
  Description of Artificial Sequence: Synthetic epitope
YHRLTKQIKP

SEQ ID NO: 54439 - protein, 10 aa, Artificial Sequence
  Description of Artificial Sequence: Synthetic epitope
YHSAHDEPQE

SEQ ID NO: 54440 - protein, 10 aa, Artificial Sequence
  Description of Artificial Sequence: Synthetic epitope
YHSMEAVRRA

SEQ ID NO: 54441 - protein, 10 aa, Artificial Sequence
  Description of Artificial Sequence: Synthetic epitope
YHSPSSMEES

SEQ ID NO: 54442 - protein, 10 aa, Artificial Sequence
  Description of Artificial Sequence: Synthetic epitope
YHVPSSDQNI

SEQ ID NO: 54443 - protein, 10 aa, Artificial Sequence
  Description of Artificial Sequence: Synthetic epitope
YIAKTTVMKY

SEQ ID NO: 54444 - protein, 10 aa, Artificial Sequence
  Description of Artificial Sequence: Synthetic epitope
YIASTKIIRI

SEQ ID NO: 54445 - protein, 10 aa, Artificial Sequence
  Description of Artificial Sequence: Synthetic epitope
YIEPYKRTMQ

SEQ ID NO: 54446 - protein, 10 aa, Artificial Sequence
  Description of Artificial Sequence: Synthetic epitope
YIINTADIST

SEQ ID NO: 54447 - protein, 10 aa, Artificial Sequence
  Description of Artificial Sequence: Synthetic epitope
YIKISNSSHS

SEQ ID NO: 54448 - protein, 10 aa, Artificial Sequence
  Description of Artificial Sequence: Synthetic epitope
YIKLMHRTSA

SEQ ID NO: 54449 - protein, 10 aa, Artificial Sequence
  Description of Artificial Sequence: Synthetic epitope
YIKSIEPQKV

SEQ ID NO: 54450 - protein, 10 aa, Artificial Sequence
  Description of Artificial Sequence: Synthetic epitope
YIKSTSLETQ

SEQ ID NO: 54451 - protein, 10 aa, Artificial Sequence
  Description of Artificial Sequence: Synthetic epitope
YINAKSRAEA

SEQ ID NO: 54452 - protein, 10 aa, Artificial Sequence
  Description of Artificial Sequence: Synthetic epitope
YINIMELAAS

SEQ ID NO: 54453 - protein, 10 aa, Artificial Sequence
  Description of Artificial Sequence: Synthetic epitope
YINMLKAKAE

SEQ ID NO: 54454 - protein, 10 aa, Artificial Sequence
  Description of Artificial Sequence: Synthetic epitope
YIQASKARDG

SEQ ID NO: 54455 - protein, 10 aa, Artificial Sequence
  Description of Artificial Sequence: Synthetic epitope
YIQRVLLTQQ

SEQ ID NO: 54456 - protein, 10 aa, Artificial Sequence
  Description of Artificial Sequence: Synthetic epitope
YIRSQTGVQI

SEQ ID NO: 54457 - protein, 10 aa, Artificial Sequence
  Description of Artificial Sequence: Synthetic epitope
YISEYMQSDS

SEQ ID NO: 54458 - protein, 10 aa, Artificial Sequence
  Description of Artificial Sequence: Synthetic epitope
YISFSLPLSE

SEQ ID NO: 54459 - protein, 10 aa, Artificial Sequence
  Description of Artificial Sequence: Synthetic epitope
YITKALSSVQ

SEQ ID NO: 54460 - protein, 10 aa, Artificial Sequence
  Description of Artificial Sequence: Synthetic epitope
YITPSTSLSP

SEQ ID NO: 54461 - protein, 10 aa, Artificial Sequence
  Description of Artificial Sequence: Synthetic epitope
YIVRLLSKKV

SEQ ID NO: 54462 - protein, 10 aa, Artificial Sequence
  Description of Artificial Sequence: Synthetic epitope
YIVVTADSSQ

SEQ ID NO: 54463 - protein, 10 aa, Artificial Sequence
  Description of Artificial Sequence: Synthetic epitope
YIWGTKAAGS

SEQ ID NO: 54464 - protein, 10 aa, Artificial Sequence
  Description of Artificial Sequence: Synthetic epitope
YIYGDMLSNV

SEQ ID NO: 54465 - protein, 10 aa, Artificial Sequence
  Description of Artificial Sequence: Synthetic epitope
YIYRHMDPVN

SEQ ID NO: 54466 - protein, 10 aa, Artificial Sequence
  Description of Artificial Sequence: Synthetic epitope
YKAEVMVSQV

SEQ ID NO: 54467 - protein, 10 aa, Artificial Sequence
  Description of Artificial Sequence: Synthetic epitope
YKDGSSNNSE

SEQ ID NO: 54468 - protein, 10 aa, Artificial Sequence
  Description of Artificial Sequence: Synthetic epitope
YKDIFVTVAG

SEQ ID NO: 54469 - protein, 10 aa, Artificial Sequence
  Description of Artificial Sequence: Synthetic epitope
YKDLSKVTTE

SEQ ID NO: 54470 - protein, 10 aa, Artificial Sequence
  Description of Artificial Sequence: Synthetic epitope
YKDRQVMNMW

SEQ ID NO: 54471 - protein, 10 aa, Artificial Sequence
  Description of Artificial Sequence: Synthetic epitope
YKDVKLTASN

SEQ ID NO: 54472 - protein, 10 aa, Artificial Sequence
  Description of Artificial Sequence: Synthetic epitope
YKDVSRAKLA

SEQ ID NO: 54473 - protein, 10 aa, Artificial Sequence
  Description of Artificial Sequence: Synthetic epitope
YKEISKFNLK

SEQ ID NO: 54474 - protein, 10 aa, Artificial Sequence
  Description of Artificial Sequence: Synthetic epitope
YKEVGWVQQV

SEQ ID NO: 54475 - protein, 10 aa, Artificial Sequence
  Description of Artificial Sequence: Synthetic epitope
YKGDASDPKA

SEQ ID NO: 54476 - protein, 10 aa, Artificial Sequence
  Description of Artificial Sequence: Synthetic epitope
YKHHMRVSRH

SEQ ID NO: 54477 - protein, 10 aa, Artificial Sequence
  Description of Artificial Sequence: Synthetic epitope
YKHKKEKPNV

SEQ ID NO: 54478 - protein, 10 aa, Artificial Sequence
  Description of Artificial Sequence: Synthetic epitope
YKIKSTGPIT

SEQ ID NO: 54479 - protein, 10 aa, Artificial Sequence
  Description of Artificial Sequence: Synthetic epitope
YKIPRASGTQ

SEQ ID NO: 54480 - protein, 10 aa, Artificial Sequence
  Description of Artificial Sequence: Synthetic epitope
YKIRVSSTRS

SEQ ID NO: 54481 - protein, 10 aa, Artificial Sequence
  Description of Artificial Sequence: Synthetic epitope
YKISANLYKQ

SEQ ID NO: 54482 - protein, 10 aa, Artificial Sequence
  Description of Artificial Sequence: Synthetic epitope
YKISNQWNKG

SEQ ID NO: 54483 - protein, 10 aa, Artificial Sequence
  Description of Artificial Sequence: Synthetic epitope
YKKLLPFKMK

SEQ ID NO: 54484 - protein, 10 aa, Artificial Sequence
  Description of Artificial Sequence: Synthetic epitope
YKKLRLSTDT

SEQ ID NO: 54485 - protein, 10 aa, Artificial Sequence
  Description of Artificial Sequence: Synthetic epitope
YKKVTASKVF

SEQ ID NO: 54486 - protein, 10 aa, Artificial Sequence
  Description of Artificial Sequence: Synthetic epitope
YKLSSLEKAG

SEQ ID NO: 54487 - protein, 10 aa, Artificial Sequence
  Description of Artificial Sequence: Synthetic epitope
YKMELLMSAL

SEQ ID NO: 54488 - protein, 10 aa, Artificial Sequence
  Description of Artificial Sequence: Synthetic epitope
YKPNSSHDIQ

SEQ ID NO: 54489 - protein, 10 aa, Artificial Sequence
  Description of Artificial Sequence: Synthetic epitope
YKQKKNSSIS

SEQ ID NO: 54490 - protein, 10 aa, Artificial Sequence
  Description of Artificial Sequence: Synthetic epitope
YKRAEDTAGQ

SEQ ID NO: 54491 - protein, 10 aa, Artificial Sequence
  Description of Artificial Sequence: Synthetic epitope
YKRQEESGAA

SEQ ID NO: 54492 - protein, 10 aa, Artificial Sequence
  Description of Artificial Sequence: Synthetic epitope
YKRVEKSDLK

SEQ ID NO: 54493 - protein, 10 aa, Artificial Sequence
  Description of Artificial Sequence: Synthetic epitope
YKSEMDSMPY

SEQ ID NO: 54494 - protein, 10 aa, Artificial Sequence
  Description of Artificial Sequence: Synthetic epitope
YKSKTLFSKA

SEQ ID NO: 54495 - protein, 10 aa, Artificial Sequence
  Description of Artificial Sequence: Synthetic epitope
YKSLFTTHSS

SEQ ID NO: 54496 - protein, 10 aa, Artificial Sequence
  Description of Artificial Sequence: Synthetic epitope
YKSSGSQEHV

SEQ ID NO: 54497 - protein, 10 aa, Artificial Sequence
  Description of Artificial Sequence: Synthetic epitope
YKTFEKGHIR

SEQ ID NO: 54498 - protein, 10 aa, Artificial Sequence
  Description of Artificial Sequence: Synthetic epitope
YKTIVHESER

SEQ ID NO: 54499 - protein, 10 aa, Artificial Sequence
  Description of Artificial Sequence: Synthetic epitope
YKTLSSLYSE

SEQ ID NO: 54500 - protein, 10 aa, Artificial Sequence
  Description of Artificial Sequence: Synthetic epitope
YKTQELQEKT

SEQ ID NO: 54501 - protein, 10 aa, Artificial Sequence
  Description of Artificial Sequence: Synthetic epitope
YKVISRMLEE

SEQ ID NO: 54502 - protein, 10 aa, Artificial Sequence
  Description of Artificial Sequence: Synthetic epitope
YKVKEIRVSE

SEQ ID NO: 54503 - protein, 10 aa, Artificial Sequence
  Description of Artificial Sequence: Synthetic epitope
YKVNILTRLA

SEQ ID NO: 54504 - protein, 10 aa, Artificial Sequence
  Description of Artificial Sequence: Synthetic epitope
YKWTEEKFVS

SEQ ID NO: 54505 - protein, 10 aa, Artificial Sequence
  Description of Artificial Sequence: Synthetic epitope
YLDIQYEDHR

SEQ ID NO: 54506 - protein, 10 aa, Artificial Sequence
  Description of Artificial Sequence: Synthetic epitope
YLDSDASFTE

SEQ ID NO: 54507 - protein, 10 aa, Artificial Sequence
  Description of Artificial Sequence: Synthetic epitope
YLDSSQVKPL

SEQ ID NO: 54508 - protein, 10 aa, Artificial Sequence
  Description of Artificial Sequence: Synthetic epitope
YLEKAKLEKE

SEQ ID NO: 54509 - protein, 10 aa, Artificial Sequence
  Description of Artificial Sequence: Synthetic epitope
YLELSLKLRK

SEQ ID NO: 54510 - protein, 10 aa, Artificial Sequence
  Description of Artificial Sequence: Synthetic epitope
YLENSATQST

SEQ ID NO: 54511 - protein, 10 aa, Artificial Sequence
  Description of Artificial Sequence: Synthetic epitope
YLESKSVKSK

SEQ ID NO: 54512 - protein, 10 aa, Artificial Sequence
  Description of Artificial Sequence: Synthetic epitope
YLESRSSGAQ

SEQ ID NO: 54513 - protein, 10 aa, Artificial Sequence
  Description of Artificial Sequence: Synthetic epitope
YLETMQSSLE

SEQ ID NO: 54514 - protein, 10 aa, Artificial Sequence
  Description of Artificial Sequence: Synthetic epitope
YLFALMMGSN

SEQ ID NO: 54515 - protein, 10 aa, Artificial Sequence
  Description of Artificial Sequence: Synthetic epitope
YLFATGNLRS

SEQ ID NO: 54516 - protein, 10 aa, Artificial Sequence
  Description of Artificial Sequence: Synthetic epitope
YLGLLQAEYT

SEQ ID NO: 54517 - protein, 10 aa, Artificial Sequence
  Description of Artificial Sequence: Synthetic epitope
YLHASEKSTE

SEQ ID NO: 54518 - protein, 10 aa, Artificial Sequence
  Description of Artificial Sequence: Synthetic epitope
YLHERPTTSS

SEQ ID NO: 54519 - protein, 10 aa, Artificial Sequence
  Description of Artificial Sequence: Synthetic epitope
YLHEVELTVT

SEQ ID NO: 54520 - protein, 10 aa, Artificial Sequence
  Description of Artificial Sequence: Synthetic epitope
YLHLKPTIEM

SEQ ID NO: 54521 - protein, 10 aa, Artificial Sequence
  Description of Artificial Sequence: Synthetic epitope
YLKSKTLYED

SEQ ID NO: 54522 - protein, 10 aa, Artificial Sequence
  Description of Artificial Sequence: Synthetic epitope
YLKSVSLQEP

SEQ ID NO: 54523 - protein, 10 aa, Artificial Sequence
  Description of Artificial Sequence: Synthetic epitope
YLKVQTSEPS

SEQ ID NO: 54524 - protein, 10 aa, Artificial Sequence
  Description of Artificial Sequence: Synthetic epitope
YLLKTQENVY

SEQ ID NO: 54525 - protein, 10 aa, Artificial Sequence
  Description of Artificial Sequence: Synthetic epitope
YLNNVLTLTA

SEQ ID NO: 54526 - protein, 10 aa, Artificial Sequence
  Description of Artificial Sequence: Synthetic epitope
YLNVGEVSTP

SEQ ID NO: 54527 - protein, 10 aa, Artificial Sequence
  Description of Artificial Sequence: Synthetic epitope
YLPSQSTTVS

SEQ ID NO: 54528 - protein, 10 aa, Artificial Sequence
  Description of Artificial Sequence: Synthetic epitope
YLQLFFLSIV

SEQ ID NO: 54529 - protein, 10 aa, Artificial Sequence
  Description of Artificial Sequence: Synthetic epitope
YLQSEVWDSE

SEQ ID NO: 54530 - protein, 10 aa, Artificial Sequence
  Description of Artificial Sequence: Synthetic epitope
YLQTTITKEA

SEQ ID NO: 54531 - protein, 10 aa, Artificial Sequence
  Description of Artificial Sequence: Synthetic epitope
YLRNTLTDQR

SEQ ID NO: 54532 - protein, 10 aa, Artificial Sequence
  Description of Artificial Sequence: Synthetic epitope
YLSTQLAQDS

SEQ ID NO: 54533 - protein, 10 aa, Artificial Sequence
  Description of Artificial Sequence: Synthetic epitope
YLVERARDAR

SEQ ID NO: 54534 - protein, 10 aa, Artificial Sequence
  Description of Artificial Sequence: Synthetic epitope
YLVRSQRATG

SEQ ID NO: 54535 - protein, 10 aa, Artificial Sequence
  Description of Artificial Sequence: Synthetic epitope
YLWELNKANL

SEQ ID NO: 54536 - protein, 10 aa, Artificial Sequence
  Description of Artificial Sequence: Synthetic epitope
YMGDESSANS

SEQ ID NO: 54537 - protein, 10 aa, Artificial Sequence
  Description of Artificial Sequence: Synthetic epitope
YMHLIQTTHH

SEQ ID NO: 54538 - protein, 10 aa, Artificial Sequence
  Description of Artificial Sequence: Synthetic epitope
YMMKVTKGDQ

SEQ ID NO: 54539 - protein, 10 aa, Artificial Sequence
  Description of Artificial Sequence: Synthetic epitope
YMMRDETLEP

SEQ ID NO: 54540 - protein, 10 aa, Artificial Sequence
  Description of Artificial Sequence: Synthetic epitope
YMQESTSEFL

SEQ ID NO: 54541 - protein, 10 aa, Artificial Sequence
  Description of Artificial Sequence: Synthetic epitope
YMQMFSVAST

SEQ ID NO: 54542 - protein, 10 aa, Artificial Sequence
  Description of Artificial Sequence: Synthetic epitope
YMRGKMQNSD

SEQ ID NO: 54543 - protein, 10 aa, Artificial Sequence
  Description of Artificial Sequence: Synthetic epitope
YNADTTIVNG

SEQ ID NO: 54544 - protein, 10 aa, Artificial Sequence
  Description of Artificial Sequence: Synthetic epitope
YNAKTENLAP

SEQ ID NO: 54545 - protein, 10 aa, Artificial Sequence
  Description of Artificial Sequence: Synthetic epitope
YNANFVTFME

SEQ ID NO: 54546 - protein, 10 aa, Artificial Sequence
  Description of Artificial Sequence: Synthetic epitope
YNAQRSQQMP

SEQ ID NO: 54547 - protein, 10 aa, Artificial Sequence
  Description of Artificial Sequence: Synthetic epitope
YNDEIANRFL

SEQ ID NO: 54548 - protein, 10 aa, Artificial Sequence
  Description of Artificial Sequence: Synthetic epitope
YNELSKSIEI

SEQ ID NO: 54549 - protein, 10 aa, Artificial Sequence
  Description of Artificial Sequence: Synthetic epitope
YNEQVAGEKE

SEQ ID NO: 54550 - protein, 10 aa, Artificial Sequence
  Description of Artificial Sequence: Synthetic epitope
YNGSLMAQIV

SEQ ID NO: 54551 - protein, 10 aa, Artificial Sequence
  Description of Artificial Sequence: Synthetic epitope
YNGSLMAQIV

SEQ ID NO: 54552 - protein, 10 aa, Artificial Sequence
  Description of Artificial Sequence: Synthetic epitope
YNIESEIEES

SEQ ID NO: 54553 - protein, 10 aa, Artificial Sequence
  Description of Artificial Sequence: Synthetic epitope
YNIKTVPHKA

SEQ ID NO: 54554 - protein, 10 aa, Artificial Sequence
  Description of Artificial Sequence: Synthetic epitope
YNKALQQLEK

SEQ ID NO: 54555 - protein, 10 aa, Artificial Sequence
  Description of Artificial Sequence: Synthetic epitope
YNKIMYFPLG

SEQ ID NO: 54556 - protein, 10 aa, Artificial Sequence
  Description of Artificial Sequence: Synthetic epitope
YNKNSWPKEQ

SEQ ID NO: 54557 - protein, 10 aa, Artificial Sequence
  Description of Artificial Sequence: Synthetic epitope
YNLDSLSLLE

SEQ ID NO: 54558 - protein, 10 aa, Artificial Sequence
  Description of Artificial Sequence: Synthetic epitope
YNLDVGLKKL

SEQ ID NO: 54559 - protein, 10 aa, Artificial Sequence
  Description of Artificial Sequence: Synthetic epitope
YNPIQKIQAN

SEQ ID NO: 54560 - protein, 10 aa, Artificial Sequence
  Description of Artificial Sequence: Synthetic epitope
YNPVKEDVQD

SEQ ID NO: 54561 - protein, 10 aa, Artificial Sequence
  Description of Artificial Sequence: Synthetic epitope
YNQLQLEKGQ

SEQ ID NO: 54562 - protein, 10 aa, Artificial Sequence
  Description of Artificial Sequence: Synthetic epitope
YNQPKAMKSI

SEQ ID NO: 54563 - protein, 10 aa, Artificial Sequence
  Description of Artificial Sequence: Synthetic epitope
YNRVRIVQLL

SEQ ID NO: 54564 - protein, 10 aa, Artificial Sequence
  Description of Artificial Sequence: Synthetic epitope
YNSMRLIVSY

SEQ ID NO: 54565 - protein, 10 aa, Artificial Sequence
  Description of Artificial Sequence: Synthetic epitope
YNSRTVMNGA

SEQ ID NO: 54566 - protein, 10 aa, Artificial Sequence
  Description of Artificial Sequence: Synthetic epitope
YNVDAANGIV

SEQ ID NO: 54567 - protein, 10 aa, Artificial Sequence
  Description of Artificial Sequence: Synthetic epitope
YNVVKRLKVE

SEQ ID NO: 54568 - protein, 10 aa, Artificial Sequence
  Description of Artificial Sequence: Synthetic epitope
YNYKKQMHRK

SEQ ID NO: 54569 - protein, 10 aa, Artificial Sequence
  Description of Artificial Sequence: Synthetic epitope
YPASKMFPFI

SEQ ID NO: 54570 - protein, 10 aa, Artificial Sequence
  Description of Artificial Sequence: Synthetic epitope
YPASSTSSTA

SEQ ID NO: 54571 - protein, 10 aa, Artificial Sequence
  Description of Artificial Sequence: Synthetic epitope
YPDEVWQTDD

SEQ ID NO: 54572 - protein, 10 aa, Artificial Sequence
  Description of Artificial Sequence: Synthetic epitope
YPEYQKIELP

SEQ ID NO: 54573 - protein, 10 aa, Artificial Sequence
  Description of Artificial Sequence: Synthetic epitope
YPHVAERVYR

SEQ ID NO: 54574 - protein, 10 aa, Artificial Sequence
  Description of Artificial Sequence: Synthetic epitope
YPIIYDIRAR

SEQ ID NO: 54575 - protein, 10 aa, Artificial Sequence
  Description of Artificial Sequence: Synthetic epitope
YPKVSASVHQ

SEQ ID NO: 54576 - protein, 10 aa, Artificial Sequence
  Description of Artificial Sequence: Synthetic epitope
YPLENKKTNA

SEQ ID NO: 54577 - protein, 10 aa, Artificial Sequence
  Description of Artificial Sequence: Synthetic epitope
YPLKFQWIGQ

SEQ ID NO: 54578 - protein, 10 aa, Artificial Sequence
  Description of Artificial Sequence: Synthetic epitope
YPNSAALRML

SEQ ID NO: 54579 - protein, 10 aa, Artificial Sequence
  Description of Artificial Sequence: Synthetic epitope
YPNSEAARAA

SEQ ID NO: 54580 - protein, 10 aa, Artificial Sequence
  Description of Artificial Sequence: Synthetic epitope
YPPEQSLTAF

SEQ ID NO: 54581 - protein, 10 aa, Artificial Sequence
  Description of Artificial Sequence: Synthetic epitope
YPQAFNNQNP

SEQ ID NO: 54582 - protein, 10 aa, Artificial Sequence
  Description of Artificial Sequence: Synthetic epitope
YPRLMAKSDT

SEQ ID NO: 54583 - protein, 10 aa, Artificial Sequence
  Description of Artificial Sequence: Synthetic epitope
YPTKGTSSPA

SEQ ID NO: 54584 - protein, 10 aa, Artificial Sequence
  Description of Artificial Sequence: Synthetic epitope
YPTSTNSSAA

SEQ ID NO: 54585 - protein, 10 aa, Artificial Sequence
  Description of Artificial Sequence: Synthetic epitope
YPVKSIPFDE

SEQ ID NO: 54586 - protein, 10 aa, Artificial Sequence
  Description of Artificial Sequence: Synthetic epitope
YQAAEKSQAH

SEQ ID NO: 54587 - protein, 10 aa, Artificial Sequence
  Description of Artificial Sequence: Synthetic epitope
YQASAVSLLP

SEQ ID NO: 54588 - protein, 10 aa, Artificial Sequence
  Description of Artificial Sequence: Synthetic epitope
YQDAIEIELE

SEQ ID NO: 54589 - protein, 10 aa, Artificial Sequence
  Description of Artificial Sequence: Synthetic epitope
YQDDIKARQM

SEQ ID NO: 54590 - protein, 10 aa, Artificial Sequence
  Description of Artificial Sequence: Synthetic epitope
YQDDLRVLSS

SEQ ID NO: 54591 - protein, 10 aa, Artificial Sequence
  Description of Artificial Sequence: Synthetic epitope
YQDLDKIDQK

SEQ ID NO: 54592 - protein, 10 aa, Artificial Sequence
  Description of Artificial Sequence: Synthetic epitope
YQEKNEHDIS

SEQ ID NO: 54593 - protein, 10 aa, Artificial Sequence
  Description of Artificial Sequence: Synthetic epitope
YQENKKGELG

SEQ ID NO: 54594 - protein, 10 aa, Artificial Sequence
  Description of Artificial Sequence: Synthetic epitope
YQEQMRDSVA

SEQ ID NO: 54595 - protein, 10 aa, Artificial Sequence
  Description of Artificial Sequence: Synthetic epitope
YQEQTNNSLK

SEQ ID NO: 54596 - protein, 10 aa, Artificial Sequence
  Description of Artificial Sequence: Synthetic epitope
YQFMSSHIKS

SEQ ID NO: 54597 - protein, 10 aa, Artificial Sequence
  Description of Artificial Sequence: Synthetic epitope
YQHNESHSRV

SEQ ID NO: 54598 - protein, 10 aa, Artificial Sequence
  Description of Artificial Sequence: Synthetic epitope
YQLEIKIPET

SEQ ID NO: 54599 - protein, 10 aa, Artificial Sequence
  Description of Artificial Sequence: Synthetic epitope
YQLKGAAKVM

SEQ ID NO: 54600 - protein, 10 aa, Artificial Sequence
  Description of Artificial Sequence: Synthetic epitope
YQLKKASQSQ

SEQ ID NO: 54601 - protein, 10 aa, Artificial Sequence
  Description of Artificial Sequence: Synthetic epitope
YQLLAQAKPM

SEQ ID NO: 54602 - protein, 10 aa, Artificial Sequence
  Description of Artificial Sequence: Synthetic epitope
YQNANSMEKE

SEQ ID NO: 54603 - protein, 10 aa, Artificial Sequence
  Description of Artificial Sequence: Synthetic epitope
YQNESRYPGG

SEQ ID NO: 54604 - protein, 10 aa, Artificial Sequence
  Description of Artificial Sequence: Synthetic epitope
YQNSNVATKP

SEQ ID NO: 54605 - protein, 10 aa, Artificial Sequence
  Description of Artificial Sequence: Synthetic epitope
YQPKSFQQKR

SEQ ID NO: 54606 - protein, 10 aa, Artificial Sequence
  Description of Artificial Sequence: Synthetic epitope
YQPRASEMQH

SEQ ID NO: 54607 - protein, 10 aa, Artificial Sequence
  Description of Artificial Sequence: Synthetic epitope
YQPSQYSPKQ

SEQ ID NO: 54608 - protein, 10 aa, Artificial Sequence
  Description of Artificial Sequence: Synthetic epitope
YQQNKSVSTD

SEQ ID NO: 54609 - protein, 10 aa, Artificial Sequence
  Description of Artificial Sequence: Synthetic epitope
YQSDLDESES

SEQ ID NO: 54610 - protein, 10 aa, Artificial Sequence
  Description of Artificial Sequence: Synthetic epitope
YQSIALELIK

SEQ ID NO: 54611 - protein, 10 aa, Artificial Sequence
  Description of Artificial Sequence: Synthetic epitope
YQSKSLMTSV

SEQ ID NO: 54612 - protein, 10 aa, Artificial Sequence
  Description of Artificial Sequence: Synthetic epitope
YQSKSRIEDK

SEQ ID NO: 54613 - protein, 10 aa, Artificial Sequence
  Description of Artificial Sequence: Synthetic epitope
YQSLKAQNAY

SEQ ID NO: 54614 - protein, 10 aa, Artificial Sequence
  Description of Artificial Sequence: Synthetic epitope
YQTFSLISSV

SEQ ID NO: 54615 - protein, 10 aa, Artificial Sequence
  Description of Artificial Sequence: Synthetic epitope
YQTGADQASI

SEQ ID NO: 54616 - protein, 10 aa, Artificial Sequence
  Description of Artificial Sequence: Synthetic epitope
YQTGQIGSVL

SEQ ID NO: 54617 - protein, 10 aa, Artificial Sequence
  Description of Artificial Sequence: Synthetic epitope
YQTLKTSLAS

SEQ ID NO: 54618 - protein, 10 aa, Artificial Sequence
  Description of Artificial Sequence: Synthetic epitope
YQTSANALAE

SEQ ID NO: 54619 - protein, 10 aa, Artificial Sequence
  Description of Artificial Sequence: Synthetic epitope
YQVDGSKSFN

SEQ ID NO: 54620 - protein, 10 aa, Artificial Sequence
  Description of Artificial Sequence: Synthetic epitope
YQVKAELESM

SEQ ID NO: 54621 - protein, 10 aa, Artificial Sequence
  Description of Artificial Sequence: Synthetic epitope
YQVQVVLKRE

SEQ ID NO: 54622 - protein, 10 aa, Artificial Sequence
  Description of Artificial Sequence: Synthetic epitope
YRATLQRTSI

SEQ ID NO: 54623 - protein, 10 aa, Artificial Sequence
  Description of Artificial Sequence: Synthetic epitope
YRDQAVQNTE

SEQ ID NO: 54624 - protein, 10 aa, Artificial Sequence
  Description of Artificial Sequence: Synthetic epitope
YRHAKQNKKN

SEQ ID NO: 54625 - protein, 10 aa, Artificial Sequence
  Description of Artificial Sequence: Synthetic epitope
YRHNYRKAGT

SEQ ID NO: 54626 - protein, 10 aa, Artificial Sequence
  Description of Artificial Sequence: Synthetic epitope
YRHSWSDHKH

SEQ ID NO: 54627 - protein, 10 aa, Artificial Sequence
  Description of Artificial Sequence: Synthetic epitope
YRKDVMLDHQ

SEQ ID NO: 54628 - protein, 10 aa, Artificial Sequence
  Description of Artificial Sequence: Synthetic epitope
YRKTAKAKEE

SEQ ID NO: 54629 - protein, 10 aa, Artificial Sequence
  Description of Artificial Sequence: Synthetic epitope
YRKVSTLQNQ

SEQ ID NO: 54630 - protein, 10 aa, Artificial Sequence
  Description of Artificial Sequence: Synthetic epitope
YRKVTTKFSN

SEQ ID NO: 54631 - protein, 10 aa, Artificial Sequence
  Description of Artificial Sequence: Synthetic epitope
YRNSMMTSVL

SEQ ID NO: 54632 - protein, 10 aa, Artificial Sequence
  Description of Artificial Sequence: Synthetic epitope
YRPYETERQA

SEQ ID NO: 54633 - protein, 10 aa, Artificial Sequence
  Description of Artificial Sequence: Synthetic epitope
YRQNIVLNRP

SEQ ID NO: 54634 - protein, 10 aa, Artificial Sequence
  Description of Artificial Sequence: Synthetic epitope
YRRWMKNEGP

SEQ ID NO: 54635 - protein, 10 aa, Artificial Sequence
  Description of Artificial Sequence: Synthetic epitope
YRSGRSVQNA

SEQ ID NO: 54636 - protein, 10 aa, Artificial Sequence
  Description of Artificial Sequence: Synthetic epitope
YRSLKSVQLY

SEQ ID NO: 54637 - protein, 10 aa, Artificial Sequence
  Description of Artificial Sequence: Synthetic epitope
YRSMADSPKS

SEQ ID NO: 54638 - protein, 10 aa, Artificial Sequence
  Description of Artificial Sequence: Synthetic epitope
YRSNRMNTPQ

SEQ ID NO: 54639 - protein, 10 aa, Artificial Sequence
  Description of Artificial Sequence: Synthetic epitope
YRSRSRSRSY

SEQ ID NO: 54640 - protein, 10 aa, Artificial Sequence
  Description of Artificial Sequence: Synthetic epitope
YRSRSRSRSY

SEQ ID NO: 54641 - protein, 10 aa, Artificial Sequence
  Description of Artificial Sequence: Synthetic epitope
YRSSKVEKLP

SEQ ID NO: 54642 - protein, 10 aa, Artificial Sequence
  Description of Artificial Sequence: Synthetic epitope
YRTKNTLQSR

SEQ ID NO: 54643 - protein, 10 aa, Artificial Sequence
  Description of Artificial Sequence: Synthetic epitope
YRTKVEQTAL

SEQ ID NO: 54644 - protein, 10 aa, Artificial Sequence
  Description of Artificial Sequence: Synthetic epitope
YRTRSALEET

SEQ ID NO: 54645 - protein, 10 aa, Artificial Sequence
  Description of Artificial Sequence: Synthetic epitope
YRWWAEVQQT

SEQ ID NO: 54646 - protein, 10 aa, Artificial Sequence
  Description of Artificial Sequence: Synthetic epitope
YRYIGKTMDY

SEQ ID NO: 54647 - protein, 10 aa, Artificial Sequence
  Description of Artificial Sequence: Synthetic epitope
YSAAKSKVEK

SEQ ID NO: 54648 - protein, 10 aa, Artificial Sequence
  Description of Artificial Sequence: Synthetic epitope
YSAEVHMSIP

SEQ ID NO: 54649 - protein, 10 aa, Artificial Sequence
  Description of Artificial Sequence: Synthetic epitope
YSALNVQHQM

SEQ ID NO: 54650 - protein, 10 aa, Artificial Sequence
  Description of Artificial Sequence: Synthetic epitope
YSDHITSPHT

SEQ ID NO: 54651 - protein, 10 aa, Artificial Sequence
  Description of Artificial Sequence: Synthetic epitope
YSDKRMVQTA

SEQ ID NO: 54652 - protein, 10 aa, Artificial Sequence
  Description of Artificial Sequence: Synthetic epitope
YSDSVSTKEV

SEQ ID NO: 54653 - protein, 10 aa, Artificial Sequence
  Description of Artificial Sequence: Synthetic epitope
YSEKDERESS

SEQ ID NO: 54654 - protein, 10 aa, Artificial Sequence
  Description of Artificial Sequence: Synthetic epitope
YSFESVLSAV

SEQ ID NO: 54655 - protein, 10 aa, Artificial Sequence
  Description of Artificial Sequence: Synthetic epitope
YSHGSQETDE

SEQ ID NO: 54656 - protein, 10 aa, Artificial Sequence
  Description of Artificial Sequence: Synthetic epitope
YSHVTAAYKE

SEQ ID NO: 54657 - protein, 10 aa, Artificial Sequence
  Description of Artificial Sequence: Synthetic epitope
YSIFTTEQQD

SEQ ID NO: 54658 - protein, 10 aa, Artificial Sequence
  Description of Artificial Sequence: Synthetic epitope
YSIKEKVEKS

SEQ ID NO: 54659 - protein, 10 aa, Artificial Sequence
  Description of Artificial Sequence: Synthetic epitope
YSISIGAHLL

SEQ ID NO: 54660 - protein, 10 aa, Artificial Sequence
  Description of Artificial Sequence: Synthetic epitope
YSKAKSGAAH

SEQ ID NO: 54661 - protein, 10 aa, Artificial Sequence
  Description of Artificial Sequence: Synthetic epitope
YSKKAAMKPK

SEQ ID NO: 54662 - protein, 10 aa, Artificial Sequence
  Description of Artificial Sequence: Synthetic epitope
YSKKTLAKSK

SEQ ID NO: 54663 - protein, 10 aa, Artificial Sequence
  Description of Artificial Sequence: Synthetic epitope
YSKLVSNKEV

SEQ ID NO: 54664 - protein, 10 aa, Artificial Sequence
  Description of Artificial Sequence: Synthetic epitope
YSKNKVLQKA

SEQ ID NO: 54665 - protein, 10 aa, Artificial Sequence
  Description of Artificial Sequence: Synthetic epitope
YSLELGMTSM

SEQ ID NO: 54666 - protein, 10 aa, Artificial Sequence
  Description of Artificial Sequence: Synthetic epitope
YSLKVDKEYE

SEQ ID NO: 54667 - protein, 10 aa, Artificial Sequence
  Description of Artificial Sequence: Synthetic epitope
YSLPINNTHI

SEQ ID NO: 54668 - protein, 10 aa, Artificial Sequence
  Description of Artificial Sequence: Synthetic epitope
YSLTELNMAG

SEQ ID NO: 54669 - protein, 10 aa, Artificial Sequence
  Description of Artificial Sequence: Synthetic epitope
YSLVSEKKSA

SEQ ID NO: 54670 - protein, 10 aa, Artificial Sequence
  Description of Artificial Sequence: Synthetic epitope
YSMKAELETK

SEQ ID NO: 54671 - protein, 10 aa, Artificial Sequence
  Description of Artificial Sequence: Synthetic epitope
YSMLNLKKLT

SEQ ID NO: 54672 - protein, 10 aa, Artificial Sequence
  Description of Artificial Sequence: Synthetic epitope
YSNGAASSVS

SEQ ID NO: 54673 - protein, 10 aa, Artificial Sequence
  Description of Artificial Sequence: Synthetic epitope
YSNRSVVGVL

SEQ ID NO: 54674 - protein, 10 aa, Artificial Sequence
  Description of Artificial Sequence: Synthetic epitope
YSNSRYSRYH

SEQ ID NO: 54675 - protein, 10 aa, Artificial Sequence
  Description of Artificial Sequence: Synthetic epitope
YSPAVAASSA

SEQ ID NO: 54676 - protein, 10 aa, Artificial Sequence
  Description of Artificial Sequence: Synthetic epitope
YSPKAIKRIK

SEQ ID NO: 54677 - protein, 10 aa, Artificial Sequence
  Description of Artificial Sequence: Synthetic epitope
YSPVQSQQIQ

SEQ ID NO: 54678 - protein, 10 aa, Artificial Sequence
  Description of Artificial Sequence: Synthetic epitope
YSQISQKNLD

SEQ ID NO: 54679 - protein, 10 aa, Artificial Sequence
  Description of Artificial Sequence: Synthetic epitope
YSQKIQEAVK

SEQ ID NO: 54680 - protein, 10 aa, Artificial Sequence
  Description of Artificial Sequence: Synthetic epitope
YSQMSRTSES

SEQ ID NO: 54681 - protein, 10 aa, Artificial Sequence
  Description of Artificial Sequence: Synthetic epitope
YSQNVRSKNK

SEQ ID NO: 54682 - protein, 10 aa, Artificial Sequence
  Description of Artificial Sequence: Synthetic epitope
YSQTEKLVAG

SEQ ID NO: 54683 - protein, 10 aa, Artificial Sequence
  Description of Artificial Sequence: Synthetic epitope
YSRELLSEKQ

SEQ ID NO: 54684 - protein, 10 aa, Artificial Sequence
  Description of Artificial Sequence: Synthetic epitope
YSRMRLKLVP

SEQ ID NO: 54685 - protein, 10 aa, Artificial Sequence
  Description of Artificial Sequence: Synthetic epitope
YSRSAVKRLQ

SEQ ID NO: 54686 - protein, 10 aa, Artificial Sequence
  Description of Artificial Sequence: Synthetic epitope
YSRSLSTEFL

SEQ ID NO: 54687 - protein, 10 aa, Artificial Sequence
  Description of Artificial Sequence: Synthetic epitope
YSRSQLSLAD

SEQ ID NO: 54688 - protein, 10 aa, Artificial Sequence
  Description of Artificial Sequence: Synthetic epitope
YSSAQSTSKT

SEQ ID NO: 54689 - protein, 10 aa, Artificial Sequence
  Description of Artificial Sequence: Synthetic epitope
YSSGYSSAEQ

SEQ ID NO: 54690 - protein, 10 aa, Artificial Sequence
  Description of Artificial Sequence: Synthetic epitope
YSSMSAFKTS

SEQ ID NO: 54691 - protein, 10 aa, Artificial Sequence
  Description of Artificial Sequence: Synthetic epitope
YSSNQTMGSQ

SEQ ID NO: 54692 - protein, 10 aa, Artificial Sequence
  Description of Artificial Sequence: Synthetic epitope
YSSQSQVLSV

SEQ ID NO: 54693 - protein, 10 aa, Artificial Sequence
  Description of Artificial Sequence: Synthetic epitope
YSSTEGSGGR

SEQ ID NO: 54694 - protein, 10 aa, Artificial Sequence
  Description of Artificial Sequence: Synthetic epitope
YSSTQVSVRP

SEQ ID NO: 54695 - protein, 10 aa, Artificial Sequence
  Description of Artificial Sequence: Synthetic epitope
YSTAAQQHQW

SEQ ID NO: 54696 - protein, 10 aa, Artificial Sequence
  Description of Artificial Sequence: Synthetic epitope
YSTITRLQNA

SEQ ID NO: 54697 - protein, 10 aa, Artificial Sequence
  Description of Artificial Sequence: Synthetic epitope
YSTNMLSLAT

SEQ ID NO: 54698 - protein, 10 aa, Artificial Sequence
  Description of Artificial Sequence: Synthetic epitope
YSTNSFALNK

SEQ ID NO: 54699 - protein, 10 aa, Artificial Sequence
  Description of Artificial Sequence: Synthetic epitope
YSTNVTVRKK

SEQ ID NO: 54700 - protein, 10 aa, Artificial Sequence
  Description of Artificial Sequence: Synthetic epitope
YSTQKNSSEQ

SEQ ID NO: 54701 - protein, 10 aa, Artificial Sequence
  Description of Artificial Sequence: Synthetic epitope
YSTSPRGTMM

SEQ ID NO: 54702 - protein, 10 aa, Artificial Sequence
  Description of Artificial Sequence: Synthetic epitope
YSTSSPINIV

SEQ ID NO: 54703 - protein, 10 aa, Artificial Sequence
  Description of Artificial Sequence: Synthetic epitope
YSTTRSASSQ

SEQ ID NO: 54704 - protein, 10 aa, Artificial Sequence
  Description of Artificial Sequence: Synthetic epitope
YSVAAILQQR

SEQ ID NO: 54705 - protein, 10 aa, Artificial Sequence
  Description of Artificial Sequence: Synthetic epitope
YSVIVKSRGI

SEQ ID NO: 54706 - protein, 10 aa, Artificial Sequence
  Description of Artificial Sequence: Synthetic epitope
YSVLESAQAF

SEQ ID NO: 54707 - protein, 10 aa, Artificial Sequence
  Description of Artificial Sequence: Synthetic epitope
YTAETTSPHP

SEQ ID NO: 54708 - protein, 10 aa, Artificial Sequence
  Description of Artificial Sequence: Synthetic epitope
YTAMEERTEE

SEQ ID NO: 54709 - protein, 10 aa, Artificial Sequence
  Description of Artificial Sequence: Synthetic epitope
YTAQAERTPD

SEQ ID NO: 54710 - protein, 10 aa, Artificial Sequence
  Description of Artificial Sequence: Synthetic epitope
YTASSKRRSR

SEQ ID NO: 54711 - protein, 10 aa, Artificial Sequence
  Description of Artificial Sequence: Synthetic epitope
YTEQSEVEST

SEQ ID NO: 54712 - protein, 10 aa, Artificial Sequence
  Description of Artificial Sequence: Synthetic epitope
YTFAKKEQFD

SEQ ID NO: 54713 - protein, 10 aa, Artificial Sequence
  Description of Artificial Sequence: Synthetic epitope
YTGNNSSQIQ

SEQ ID NO: 54714 - protein, 10 aa, Artificial Sequence
  Description of Artificial Sequence: Synthetic epitope
YTISSALNLM

SEQ ID NO: 54715 - protein, 10 aa, Artificial Sequence
  Description of Artificial Sequence: Synthetic epitope
YTLPTKVAKE

SEQ ID NO: 54716 - protein, 10 aa, Artificial Sequence
  Description of Artificial Sequence: Synthetic epitope
YTLSHVNLSA

SEQ ID NO: 54717 - protein, 10 aa, Artificial Sequence
  Description of Artificial Sequence: Synthetic epitope
YTLWETGKGQ

SEQ ID NO: 54718 - protein, 10 aa, Artificial Sequence
  Description of Artificial Sequence: Synthetic epitope
YTNKISSEAH

SEQ ID NO: 54719 - protein, 10 aa, Artificial Sequence
  Description of Artificial Sequence: Synthetic epitope
YTQKEESAEQ

SEQ ID NO: 54720 - protein, 10 aa, Artificial Sequence
  Description of Artificial Sequence: Synthetic epitope
YTQLDAAQMR

SEQ ID NO: 54721 - protein, 10 aa, Artificial Sequence
  Description of Artificial Sequence: Synthetic epitope
YTRGAISSTQ

SEQ ID NO: 54722 - protein, 10 aa, Artificial Sequence
  Description of Artificial Sequence: Synthetic epitope
YTSDGNTKYK

SEQ ID NO: 54723 - protein, 10 aa, Artificial Sequence
  Description of Artificial Sequence: Synthetic epitope
YTSPRTVTQA

SEQ ID NO: 54724 - protein, 10 aa, Artificial Sequence
  Description of Artificial Sequence: Synthetic epitope
YTSSTLLPYG

SEQ ID NO: 54725 - protein, 10 aa, Artificial Sequence
  Description of Artificial Sequence: Synthetic epitope
YTSTSVQASQ

SEQ ID NO: 54726 - protein, 10 aa, Artificial Sequence
  Description of Artificial Sequence: Synthetic epitope
YTTKQVITKK

SEQ ID NO: 54727 - protein, 10 aa, Artificial Sequence
  Description of Artificial Sequence: Synthetic epitope
YTTQRMKHSS

SEQ ID NO: 54728 - protein, 10 aa, Artificial Sequence
  Description of Artificial Sequence: Synthetic epitope
YTVFKVLKNS

SEQ ID NO: 54729 - protein, 10 aa, Artificial Sequence
  Description of Artificial Sequence: Synthetic epitope
YTVITFKQKI

SEQ ID NO: 54730 - protein, 10 aa, Artificial Sequence
  Description of Artificial Sequence: Synthetic epitope
YTVSPRKEDP

SEQ ID NO: 54731 - protein, 10 aa, Artificial Sequence
  Description of Artificial Sequence: Synthetic epitope
YTVSSMSARP

SEQ ID NO: 54732 - protein, 10 aa, Artificial Sequence
  Description of Artificial Sequence: Synthetic epitope
YVAEDQQYQW

SEQ ID NO: 54733 - protein, 10 aa, Artificial Sequence
  Description of Artificial Sequence: Synthetic epitope
YVANQASSGA

SEQ ID NO: 54734 - protein, 10 aa, Artificial Sequence
  Description of Artificial Sequence: Synthetic epitope
YVASTKYQKS

SEQ ID NO: 54735 - protein, 10 aa, Artificial Sequence
  Description of Artificial Sequence: Synthetic epitope
YVEAKSSVLE

SEQ ID NO: 54736 - protein, 10 aa, Artificial Sequence
  Description of Artificial Sequence: Synthetic epitope
YVFNSGVRPD

SEQ ID NO: 54737 - protein, 10 aa, Artificial Sequence
  Description of Artificial Sequence: Synthetic epitope
YVFQGEAAEI

SEQ ID NO: 54738 - protein, 10 aa, Artificial Sequence
  Description of Artificial Sequence: Synthetic epitope
YVIQGMANIE

SEQ ID NO: 54739 - protein, 10 aa, Artificial Sequence
  Description of Artificial Sequence: Synthetic epitope
YVKNTASASS

SEQ ID NO: 54740 - protein, 10 aa, Artificial Sequence
  Description of Artificial Sequence: Synthetic epitope
YVKRQPAIQK

SEQ ID NO: 54741 - protein, 10 aa, Artificial Sequence
  Description of Artificial Sequence: Synthetic epitope
YVLKIKILSA

SEQ ID NO: 54742 - protein, 10 aa, Artificial Sequence
  Description of Artificial Sequence: Synthetic epitope
YVMANVATKI

SEQ ID NO: 54743 - protein, 10 aa, Artificial Sequence
  Description of Artificial Sequence: Synthetic epitope
YVNNEGFSAV

SEQ ID NO: 54744 - protein, 10 aa, Artificial Sequence
  Description of Artificial Sequence: Synthetic epitope
YVPEMVLTPD

SEQ ID NO: 54745 - protein, 10 aa, Artificial Sequence
  Description of Artificial Sequence: Synthetic epitope
YVPIMVKSKL

SEQ ID NO: 54746 - protein, 10 aa, Artificial Sequence
  Description of Artificial Sequence: Synthetic epitope
YVPRKKASLP

SEQ ID NO: 54747 - protein, 10 aa, Artificial Sequence
  Description of Artificial Sequence: Synthetic epitope
YVQKHISAEN

SEQ ID NO: 54748 - protein, 10 aa, Artificial Sequence
  Description of Artificial Sequence: Synthetic epitope
YVQRQADSKQ

SEQ ID NO: 54749 - protein, 10 aa, Artificial Sequence
  Description of Artificial Sequence: Synthetic epitope
YVRAVRKSKI

SEQ ID NO: 54750 - protein, 10 aa, Artificial Sequence
  Description of Artificial Sequence: Synthetic epitope
YVRRNKSESF

SEQ ID NO: 54751 - protein, 10 aa, Artificial Sequence
  Description of Artificial Sequence: Synthetic epitope
YVSESMDRSS

SEQ ID NO: 54752 - protein, 10 aa, Artificial Sequence
  Description of Artificial Sequence: Synthetic epitope
YVSMSTLATT

SEQ ID NO: 54753 - protein, 10 aa, Artificial Sequence
  Description of Artificial Sequence: Synthetic epitope
YVSYDVQKRT

SEQ ID NO: 54754 - protein, 10 aa, Artificial Sequence
  Description of Artificial Sequence: Synthetic epitope
YVTDHIEVVQ

SEQ ID NO: 54755 - protein, 10 aa, Artificial Sequence
  Description of Artificial Sequence: Synthetic epitope
YVYQTQSSAF

SEQ ID NO: 54756 - protein, 10 aa, Artificial Sequence
  Description of Artificial Sequence: Synthetic epitope
YVYRPLKHTL

SEQ ID NO: 54757 - protein, 10 aa, Artificial Sequence
  Description of Artificial Sequence: Synthetic epitope
YWAGMAAIQV

SEQ ID NO: 54758 - protein, 10 aa, Artificial Sequence
  Description of Artificial Sequence: Synthetic epitope
YWGQTRLKSA

SEQ ID NO: 54759 - protein, 10 aa, Artificial Sequence
  Description of Artificial Sequence: Synthetic epitope
YWNAASFPNP

SEQ ID NO: 54760 - protein, 10 aa, Artificial Sequence
  Description of Artificial Sequence: Synthetic epitope
YWNERIAPEV

SEQ ID NO: 54761 - protein, 10 aa, Artificial Sequence
  Description of Artificial Sequence: Synthetic epitope
YWYYLYDNAM

SEQ ID NO: 54762 - protein, 10 aa, Artificial Sequence
  Description of Artificial Sequence: Synthetic epitope
YYAQERKQLA

SEQ ID NO: 54763 - protein, 10 aa, Artificial Sequence
  Description of Artificial Sequence: Synthetic epitope
YYFREYSWSH

SEQ ID NO: 54764 - protein, 10 aa, Artificial Sequence
  Description of Artificial Sequence: Synthetic epitope
YYKDQWRPRK

SEQ ID NO: 54765 - protein, 10 aa, Artificial Sequence
  Description of Artificial Sequence: Synthetic epitope
YYKSLLSAEE

SEQ ID NO: 54766 - protein, 10 aa, Artificial Sequence
  Description of Artificial Sequence: Synthetic epitope
YYLSVAQLER

SEQ ID NO: 54767 - protein, 10 aa, Artificial Sequence
  Description of Artificial Sequence: Synthetic epitope
YYLVQPDITT

SEQ ID NO: 54768 - protein, 10 aa, Artificial Sequence
  Description of Artificial Sequence: Synthetic epitope
YYNANGDVVE

SEQ ID NO: 54769 - protein, 10 aa, Artificial Sequence
  Description of Artificial Sequence: Synthetic epitope
YYSTSYKRRY

SEQ ID NO: 54770 - protein, 10 aa, Artificial Sequence
  Description of Artificial Sequence: Synthetic epitope
YYTDTSQKEA

SEQ ID NO: 54771 - protein, 10 aa, Artificial Sequence
  Description of Artificial Sequence: Synthetic epitope
ZBGSZZBYVD

SEQ ID NO: 54772 - protein, 9 aa, Artificial Sequence
  Description of Artificial Sequence: Synthetic peptide
  MOD_RES (7)..(7): pSer
  MOD_RES (9)..(9): pSer
PSIRCSSVS

SEQ ID NO: 54773 - protein, 12 aa, Artificial Sequence
  Description of Artificial Sequence: Synthetic peptide
  MOD_RES (6)..(6): pTyr
CSAAPYLKTKFI

SEQ ID NO: 54774 - protein, 12 aa, Artificial Sequence
  Description of Artificial Sequence: Synthetic peptide
  MOD_RES (6)..(6): pTyr
CKGTGYIKTELI

SEQ ID NO: 54775 - protein, 9 aa, Artificial Sequence
  Description of Artificial Sequence: Synthetic peptide
  MOD_RES (5)..(5): pThr
ATMKTFCGT

SEQ ID NO: 54776 - protein, 11 aa, Artificial Sequence
  Description of Artificial Sequence: Synthetic peptide
  MOD_RES (7)..(7): pSer
CHFPQFSYSAS

SEQ ID NO: 54777 - protein, 12 aa, Artificial Sequence
  Description of Artificial Sequence: Synthetic peptide
  MOD_RES (6)..(6): pThr
  MOD_RES (8)..(8): pTyr
CSFMMTPYVVTR

SEQ ID NO: 54778 - protein, 11 aa, Artificial Sequence
  Description of Artificial Sequence: Synthetic peptide
  MOD_RES (6)..(6): pThr
  MOD_RES (8)..(8): pTyr
HTGFLTEYVAC

SEQ ID NO: 54779 - protein, 11 aa, Artificial Sequence
  Description of Artificial Sequence: Synthetic peptide
  MOD_RES (6)..(6): pTyr
CSRGDYMTMQM

SEQ ID NO: 54780 - protein, 11 aa, Artificial Sequence
  Description of Artificial Sequence: Synthetic peptide
  MOD_RES (6)..(6): pTyr
CGSGDYMPMSP

SEQ ID NO: 54781 - protein, 11 aa, Artificial Sequence
  Description of Artificial Sequence: Synthetic peptide
  MOD_RES (6)..(6): pSer
CSRTESITATS

SEQ ID NO: 54782 - protein, 12 aa, Artificial Sequence
  Description of Artificial Sequence: Synthetic peptide
  MOD_RES (7)..(7): pTyr
CTGTEEYMKMDL

SEQ ID NO: 54783 - protein, 11 aa, Artificial Sequence
  Description of Artificial Sequence: Synthetic peptide
  MOD_RES (6)..(6): pThr
  MOD_RES (8)..(8): pThr
CHITTTPTPTQ

SEQ ID NO: 54784 - protein, 11 aa, Artificial Sequence
  Description of Artificial Sequence: Synthetic peptide
  MOD_RES (4)..(4): pSer
RCYSAEVVTLW

SEQ ID NO: 54785 - protein, 11 aa, Artificial Sequence
  Description of Artificial Sequence: Synthetic peptide
  MOD_RES (6)..(6): pTyr
CGEGTYGTVFK

SEQ ID NO: 54786 - protein, 10 aa, Artificial Sequence
  Description of Artificial Sequence: Synthetic peptide
  MOD_RES (6)..(6): pTyr
CDNPDYQQDF

SEQ ID NO: 54787 - protein, 10 aa, Artificial Sequence
  Description of Artificial Sequence: Synthetic peptide
  MOD_RES (7)..(7): pSer
CATSNNSTVA

SEQ ID NO: 54788 - protein, 9 aa, Artificial Sequence
  Description of Artificial Sequence: Synthetic peptide
PSIRCSSVS

SEQ ID NO: 54789 - protein, 12 aa, Artificial Sequence
  Description of Artificial Sequence: Synthetic peptide
CSAAPYLKTKFI

SEQ ID NO: 54790 - protein, 12 aa, Artificial Sequence
  Description of Artificial Sequence: Synthetic peptide
CKGTGYIKTELI

SEQ ID NO: 54791 - protein, 9 aa, Artificial Sequence
  Description of Artificial Sequence: Synthetic peptide
ATMKIFCGT

SEQ ID NO: 54792 - protein, 11 aa, Artificial Sequence
  Description of Artificial Sequence: Synthetic peptide
CHFPQFSYSAS

SEQ ID NO: 54793 - protein, 12 aa, Artificial Sequence
  Description of Artificial Sequence: Synthetic peptide
CSFMMTPYVVTR

SEQ ID NO: 54794 - protein, 11 aa, Artificial Sequence
  Description of Artificial Sequence: Synthetic peptide
HTGFLTEYVAC

SEQ ID NO: 54795 - protein, 11 aa, Artificial Sequence
  Description of Artificial Sequence: Synthetic peptide
CSRGDYMTMQM

SEQ ID NO: 54796 - protein, 11 aa, Artificial Sequence
  Description of Artificial Sequence: Synthetic peptide
CGSGDYMPMSP

SEQ ID NO: 54797 - protein, 11 aa, Artificial Sequence
  Description of Artificial Sequence: Synthetic peptide
CSRTESITATS

SEQ ID NO: 54798 - protein, 12 aa, Artificial Sequence
  Description of Artificial Sequence: Synthetic peptide
CTGTEEYMKMDL

SEQ ID NO: 54799 - protein, 11 aa, Artificial Sequence
  Description of Artificial Sequence: Synthetic peptide
  MOD_RES (8)..(8): pThr
CHITTTPTPTQ

SEQ ID NO: 54800 - protein, 11 aa, Artificial Sequence
  Description of Artificial Sequence: Synthetic peptide
RCYSAEVVTLW

SEQ ID NO: 54801 - protein, 11 aa, Artificial Sequence
  Description of Artificial Sequence: Synthetic peptide
CGEGTYGTVFK

SEQ ID NO: 54802 - protein, 10 aa, Artificial Sequence
  Description of Artificial Sequence: Synthetic peptide
CDNPDYQQDF

SEQ ID NO: 54803 - protein, 10 aa, Artificial Sequence
  Description of Artificial Sequence: Synthetic peptide
CATSNNSTVA

SEQ ID NO: 54804 - protein, 120 aa, Artificial Sequence
  Description of Artificial Sequence: Synthetic polypeptide
GVQLQQSGAELVKPGASVKLSCTASGFKIKDTYMHWMKQRPEQGLEWIGRIDPANGNSHYDPKIQGKATMTADKSSNTAYLQLSSLTSEDTAVYYCASIYYGNNYVMDYWGQGTSVTVSS

SEQ ID NO: 54805 - protein, 112 aa, Artificial Sequence
  Description of Artificial Sequence: Synthetic polypeptide
DVLMTQTPLSLPVSLGDQASISCRSSQTMVHSNGNTYLEWYLQKPGQSPKLLIYKVSNRFSGVPDRFSGSGSGTDFTLKISRVEAEDLGVYYCFQGSLVPLTFGAGTKVELK

SEQ ID NO: 54806 - protein, 112 aa, Artificial Sequence
  Description of Artificial Sequence: Synthetic polypeptide
DVLMTQTPLSLPVSLGDQASISCRSSQSIVHSNGNTYLEWYLQKPGQSPKLLIYKVSNRFSGVPDRFSGSGSGTDFTLKISRVEAEDLGFYYCFQGSHLPLTFGAGTKLELK

SEQ ID NO: 54807 - DNA, 2896 bp, Artificial Sequence
  Description of Artificial Sequence: Synthetic polynucleotide
ggtacctcaggcatttgagaagcacacggtcacactgcttccggtagtcaataaaccggtaaaccagcaatagacataagcggctatttaacgaccctgccctgaaccgacgaccgggtcgaatttgctttcgaatttctgccattcatccgcttattatcacttattcaggcgtagcaccaggcgtttaagggcaccaataactgccttaaaaaaattacgccccgccctgccactcatcgcagtactgttgtaattcattaagcattctgccgacatggaagccatcaaagacggcatgatgaacctgaatcgccagcggcatcagcaccttgtcgccttgcgtataatatttgcccatggtgaaaacgggggcgaagaagttgtccatattggccacgtttaaatcaaaactggtgaaactcacccagggattggctgagacgaaaaacatattctcaataaaccctttagggaaataggccaggttttcaccgtaacacgccacatcttgcgaatatatgtgtagaaactgccggaaatcgtcgtggtattcactccagagcgatgaaaacgtttcagtttgctcatggaaaacggtgtaacaagggtgaacactatcccatatcaccagctcaccgtctttcattgccatacggaattccggatgagcattcatcaggcgggcaagaatgtgaataaaggccggataaaacttgtgcttatttttctttacggtctttaaaaaggccgtaatatccagctgaacggtctggttataggtacattgagcaactgactgaaatgcctcaaaatgttctttacgatgccattgggatatatcaacggtggtatatccagtgatttttttctccattttagcttccttagctcctgaaaatctcgataactcaaaaaatacgcccggtagtgatcttatttcattatggtgaaagttggaacctcttacgtgccgatcaacgtctcattttcgccaaaagttggcccagggcttcccggtatcaacagggacaccaggatttatttattctgcgaagtgatcttccgtcacaggtatttattcggcgctgcggacacatacaaagttacccacagattccgtggataagcaggggactaacatgtgaggcaaaacagcagggccgcgccggtggcgtttttccataggctccgccctcctgccagagttcacataaacagacgcttttccggtgcatctgtgggagccgtgaggctcaaccatgaatctgacagtacgggcgaaacccgacaggacttaaagatccccaccgtttccggcgggtcgctccctcttgcgctctcctgttccgaccctgccgtttaccggatacctgttccgcctttctcccttacgggaagtgtggcgctttctcatagctcacacactggtatctcggctcggtgtaggtcgttcgctccaagctgggctgtaagcaagaactccccgttcagcccgactgctgcgccttatccggtaactgttcacttgagtccaacccggaaaagcacggtaaaacgccactggcagcagccattggtaactgggagttcgcagaggatttgtttagctaaacacgcggttgctcttgaagtgtgcgccaaagtccggctacactggaaggacagatttggttgctgtgctctgcgaaaaccagttaccacggttaagcagttccccaactgacttaaccttcgatcaaaccacctccccaggtggttttttcgtttacagggcaaaagattacgcgcagaaaaaaaggatctcaagaagatcctttgatccatgttagtaacacgacaggtttcccgactggaaagcgggcagtgagcgcaacgcaattaatgtgagttagctcactcattaggcaccccaggctttacactttatgcttccggctcgtatgttgtgtggaattgtgagcggataacaatttcacgaattctagattaagaaggagaaatatcatgaagaaaatttggctggcgctggctggtttagttttagcgttttcggctagcgcggcgtcgaccaagggcccatcggtcttccccctggcaccctcctccaagagcacctctgggggcacagcggccctgggctgcctggtcaaggactacttccccgaaccggtgacggtgtcgtggaactcaggcgccctgaccagcggcgtgcacaccttcccggctgtcctacagtcctcaggactctactccctcagcagcgtggtgaccgtgccctccagcagcttgggcacccagacctacatctgcaacgtgaatcacaagcccagcaacaccaaggtggacaagagagttgagcccaaatcttgttaggcggccgcaggtggcggctccggttccggtgattttgattatgaaaaaatggcaaacgctaataagggggctatgaccgaaaatgccgatgaaaacgcgctacagtctgacgctaaaggcaaacttgattctgtcgctactgattacggtgctgctatcgatggtttcattggtgacgtttccggccttgctaatggtaatggtgctactggtgattttgctggctctaattcccaaatggctcaagtcggtgacggtgataattcacctttaatgaataatttccgtcaatatttaccttccctccctcaatcggttgaatgtcgcccttttgtctttggcgctggtaaaccatatgaattttctattgattgtgacaaaataaacttattccgtggtgtctttgcgtttcttttatatgttgccacctttatgtatgtattttctacgtttgctaacatactgcgtaataaggagtcttgataagcttattaaaggctccttttggagcctttttttt

SEQ ID NO: 54808 - DNA, 3118 bp, Artificial Sequence
  Description of Artificial Sequence: Synthetic polynucleotide
aaattgtaagcgttaatattttgttaaaattcgcgttaaatttttgttaaatcagctcattttttaaccaataggccgaaatcggcaaaatcccttataaatcaaaagaatagaccgagatagggttgagtgttgttccagtttggaacaagagtccactattaaagaacgtggactccaacgtcaaagggcgaaaaaccgtctatcagggcgatggcccactacgtgaaccatcaccctaatcaagttttttggggtcgaggtgccgtaaagcactaaatcggaaccctaaagggagcccccgatttagagcttgacggggaaagccggcgaacgtggcgagaaaggaagggaagaaagcgaaaggagcgggcgctagggcgctggcaagtgtagcggtcacgctgcgcgtaaccaccacacccgccgcgcttaatgcgccgctacagggcgcgtcaggtggcacttttcggggaaatgtgcgcggaacccctatttgtttatttttctaaatacattcaaatatgtatccgctcatgagacaataaccctgataaatgcttcaataatattgaaaaaggaagagtatgagtattcaacatttccgtgtcgcccttattcccttttttgcggcattttgccttcctgtttttgctcacccagaaacgctggtgaaagtaaaagatgctgaagatcagttgggtgcacgagtgggttacatcgaactggatctcaacagcggtaagatccttgagagttttcgccccgaagaacgttttccaatgatgagcacttttaaagttctgctatgtggcgcggtattatcccgtattgacgccgggcaagagcaactcggtcgccgcatacactattctcagaatgacttggttgagtactcaccagtcacagaaaagcatcttacggatggcatgacagtaagagaattatgcagtgctgccataaccatgagtgataacactgcggccaacttacttctgacaacgatcggaggaccgaaggagctaaccgcttttttgcacaacatgggggatcatgtaactcgccttgatcgttgggaaccggagctgaatgaagccataccaaacgacgagcgtgacaccacgatgcctgtagcaatggcaacaacgttgcgcaaactattaactggcgaactacttactctagcttcccggcaacaattaatagactggatggaggcggataaagttgcaggaccacttctgcgctcggcccttccggctggctggtttattgctgataaatctggagccggtgagcgtgggtctcgcggtatcattgcagcactggggccagatggtaagccctcccgtatcgtagttatctacacgacggggagtcaggcaactatggatgaacgaaatagacagatcgctgagataggtgcctcactgattaagcattggtaactgtcagaccaagtttactcatatatactttagattgatttaaaacttcatttttaatttaaaaggatctaggtgaagatcctttttgataatctcatgaccaaaatcccttaacgtgagttttcgttccactgagcgtcagaccccgtagaaaagatcaaaggatcttcttgagatcctttttttctgcgcgtaatctgctgcttgcaaacaaaaaaaccaccgctaccagcggtggtttgtttgccggatcaagagctaccaactctttttccgaaggtaactggcttcagcagagcgcagataccaaatactgtccttctagtgtagccgtagttaggccaccacttcaagaactctgtagcaccgcctacatacctcgctctgctaatcctgttaccagtggctgctgccagtggcgataagtcgtgtcttaccgggttggactcaagacgatagttaccggataaggcgcagcggtcgggctgaacggggggttcgtgcacacagcccagcttggagcgaacgacctacaccgaactgagatacctacagcgtgagctatgagaaagcgccacgcttcccgaagggagaaaggcggacaggtatccggtaagcggcagggtcggaacaggagagcgcacgagggagcttccagggggaaacgcctggtatctttatagtcctgtcgggtttcgccacctctgacttgagcgtcgatttttgtgatgctcgtcaggggggcggagcctatggaaaaacgccagcaacgcggcctttttacggttcctggccttttgctggccttttgctcacatgttagtaacacgacaggtttcccgactggaaagcgggcagtgagcgcaacgcaattaatgtgagttagctcactcattaggcaccccaggctttacactttatgcttccggctcgtatgttgtgtggaattgtgagcggataacaatttcacgaattctaaactagctagtcgccaaggagacagtcataatgaaatacctattgcctacggcagccgctggattgttattactcgctgcccaaccagccatggcctaacacgtgctaggtcagcccaaggctgccccctcggtcactctgttcccgccctcctctgaggagcttcaagccaacaaggccacactggtgtgtctcataagtgacttctacccgggagccgtgacagtggcctggaaggcagatagcagccccgtcaaggcgggagtggagaccaccacaccctccaaacaaagcaacaacaagtacgcggccagcagctatctgagcctgacgcctgagcagtggaagtcccacagaagctacagctgccaggtcacgcatgaagggagcaccgtggagaagacagtggcccctacagaatgttcaggtgcagctcatcaccaccatcaccattaatctagagcttattaaaggctccttttggagccttttttttggtacccaattcgccctatagtgagtcgtattacaattcactggccgtcgttttacaacgtcgtgactgggaaaaccctggcgttacccaacttaatcgccttgcagcacatccccctttcgccagctggcgtaatagcgaagaggcccgcaccgatcgcccttcccaacagttgcgcagcctgaatggcgaatgg
